(19) United States
(12) Patent Application Publication
(10) Pub. No.: US 2022/0090045 A1
(43) Pub. Date: Mar. 24, 2022

(54) METHODS FOR PRODUCING ISOPROPANOL AND ACETONE IN A MICROORGANISM

(71) Applicant: Lallemand Hungary Liquidity Management LLC, Budapest (HU)

(72) Inventors: Aaron Argyros, Lebanon, NH (US); William R. Kenealy, West Lebanon, NH (US); Emily Stonehouse, Etna, NH (US)

(21) Appl. No.: 17/548,372

(22) Filed: Dec. 10, 2021

Related U.S. Application Data
(63) Continuation-in-part of application No. 14/911,102, filed on Feb. 9, 2016.
(60) Provisional application No. 61/866,338, filed on Aug. 15, 2013.

(51) Int. Cl. C12N 9/88; C12N 9/10; C12P 7/36; C07K 14/40; C12N 9/12; C12N 9/00; C07K 14/395; C12N 9/04; C12P 7/04

(52) U.S. Cl. CPC C12N 9/88; C12P 7/04; C12Y 101/01001; C12P 7/36; C12Y 401/02009; C07K 14/40; C12N 9/1217; C12Y 203/01054; C12Y 207/02001; C12Y 208/03011; C12Y 401/01004; C12N 9/1029; C12N 9/93; C12Y 203/01008; C12Y 602/01001; C07K 14/395; C12N 9/0006; C12N 9/13

(57) ABSTRACT

The present disclosure provides for novel metabolic pathways to increase acetone and isopropanol formation. More specifically, the present disclosure provides for a recombinant microorganism comprising a plurality of first native and/or heterologous enzymes that function in a first engineered metabolic pathway to convert fructose-6-phosphate to acetyl-CoA and acetate (e.g., phosphoketolase and acetate kinase), wherein the plurality of first native and/or heterologous enzymes is activated, upregulated, or overexpressed. The recombinant microorganism further comprises a plurality of second native and/or heterologous enzymes that function in a second engineered metabolic pathways to convert acetyl-CoA and acetate to isopropanol (e.g., thiolase, CoA transferase and acetoacetate decarboxylase), wherein the plurality of second native and/or heterologous enzymes is activated, upregulated, or overexpressed. Also provided are methods for making isopropanol or acetone using the recombinant microorganisms.

### STATEMENT REGARDING SEQUENCE LISTING

[0001] The Sequence Listing associated with this application is provided in text format in lieu of a paper copy, and is hereby incorporated by reference into the specification. The name of the text file containing the Sequence Listing is 580127_439C1_SEQUENCE_LISTING.txt. The text file is 1.0 MB, was created on Dec. 10, 2021, and is being submitted electronically via EFS-Web.

### BACKGROUND OF THE INVENTION

[0002] The conversion of biomass, such as corn, sugarcane or other energy crops, as well as simple sugars, to ethanol is routinely completed through the use of yeast fermentation. However, during yeast metabolism a major by-product of fermentation is glycerol.

[0003] Glycerol is a required metabolic end-product of native yeast ethanol fermentation allowing the yeast to balance its redox state and regenerate NAD⁺ used as a cofactor during glycolysis. During anaerobic growth on carbohydrates, production of ethanol and carbon dioxide is redox neutral, while the reactions that create cell biomass and associated carbon dioxide are more oxidized relative to carbohydrates. The production of glycerol, which is more reduced relative to carbohydrates, functions as an electron sink to off-set cell biomass formation, so that overall redox neutrality is conserved. This is essential from a theoretical consideration of conservation of mass, and in practice strains unable to produce glycerol are unable to grow under anaerobic conditions.

[0004] As glycerol is a byproduct with low value, it can be an undesirable by-product of fermentation. There is a strong commercial incentive to reduce glycerol as a by-product during the production of fuels and chemicals, as reduction typically results in an increased yield of the desired compound. Thus, it would be beneficial to reduce or eliminate the endogenous production of this by-product and further direct more carbon towards desired end-products, such as ethanol and other fuels and chemicals, including but not limited to isopropanol.

[0005] Several strategies are available in the art for the conversion of glycerol to higher value products though biochemical or other means. In addition, various strategies have been employed to reduce glycerol production, which may lead to an improvement of overall sugar yield to ethanol or other desired end-products of metabolism. See Nielsen, J., et al. “Metabolic engineering of yeast for production of fuels and chemicals,” Curr. Opin. Biotechnol. 24:1-7 (2013). Through engineering of alternate pathways, with the simultaneous reduction or deletion of the glycerol pathway, alternate or replacement electron acceptors for the regeneration of NAD⁺ can be used during yeast metabolism. Examples of such alternate or replacement electron acceptors include molecules such as formate or hydrogen.

[0006] The elimination of glycerol synthesis genes has been demonstrated but removal of this pathway completely blocked anaerobic growth of the yeast, preventing useful application during an industrial process. Ansell, R., et al., EMBO J. 16:2179-87 (1997); Pahlman, A-K., et al., J. Biol. Chem. 276:3555-63 (2001); Guo, Z P., et al., Metab. Eng. 13:49-59 (2011). Other methods to bypass glycerol formation require the co-utilization of additional carbon sources, such as xylose or acetate, to serve as electron acceptors. Lidén, G., et al., Appl. Env. Microbiol. 62:3894-96 (1996); Medina, V. G., et al., Appl. Env. Microbiol. 76:190-195 (2010). The engineering of a pyruvate formate lyase from E. coli, which is capable of converting pyruvate to formate, was performed previously to increase formate production. Waks, Z., and Silver, P. A., Appl. Env. Microbiol. 75:1867-1875 (2009). As demonstrated in International Application No. WO 2012/138942, which is incorporated by reference herein in its entirety, incorporation of a formate pathway as an alternate electron acceptor allows for glycerol formation to be bypassed and ethanol yield to be increased.

[0007] In addition to its known role during anaerobic growth, glycerol is also synthesized by S. cerevisiae in response to osmotic stress. The formation of glycerol is mediated in part by the activity of two glycerol-3-phosphate dehydrogenases: GPD1 and GPD2. Glycerol formed in response to osmotic stress is mediated primarily through the action of GPD1, whereas glycerol formed as an electron sink for excess electrons generated during production of biomass during anaerobic growth is mediated primarily through the action of GPD2. See Ansell, et al., “The two isoenzymes for yeast NAD⁺-dependent glycerol 3-phosphate dehydrogenase encoded by GPD1 and GPD2 have distinct roles in osmoadaptation and redox regulation,” The EMBO Journal 16:2179-87 (1997). Glycerol is exported from the yeast cell through an aquaporin channel known as FPS1. This channel is closed in response to osmotic stress in order to reduce glycerol efflux from the cell, thereby enabling accumulation of higher levels of intracellular glycerol. See Remize, F., et al., “Glycerol Export and Glycerol-3-phosphate Dehydrogenase, but Not Glycerol Phosphatase, Are Rate Limiting for Glycerol Production in Saccharomyces cerevisiae,” Metabol. Engineering 3:301-12 (2001). In addition, the yeast cell can increase intracellular glycerol levels through uptake of glycerol from the extracellular environment through the action of another glycerol transporter known as STL1. The expression of STL1, however, is limited by transcriptional repression of the gene in the presence of glucose. See Ferreira, C., et al., “A Member of the Sugar Transporter Family, Stl1p Is the Glycerol/H⁺ Symporter in Saccharomyces cerevisiae,” Mol. Biol. Cell 16:2068-76 (2005) and Tulha, J., et al., “Saccharomyces cerevisiae glycerol/H⁺ symporter Stl1p is essential for cold, near-freeze, and freeze stress adaptation. A simple recipe with high biotechnological potential is given,” Microb. Cell Factories 9:82 (2010).

[0008] The production of glycerol in response to osmotic stress has been identified and reviewed. See Petrovska, B. et al., “Glycerol production by yeasts under osmotic and sulfite stress,” Can J Microbiol 45:695-699 (1999) and Hohmann, et al., “Yeast Osmoregulation,” Methods in Enzymology 428:29-45 (2007). Anaerobic glycerol production in response to osmotic stress, however, cannot occur in the absence of an accompanying oxidation reaction. Under anaerobic conditions, a yeast strain in stationary phase needs to generate reducing power to make glycerol in response to osmotic stress. The net result is that in addition to making glycerol in response to osmotic stress, the organism must also make an oxidized end product which further reduces the yield of the desired product.

[0009] It has been shown that an increase in acetate, pyruvate and succinate production accompanies anaerobic glycerol production in response to osmotic stress. See Modig, T., et al., “Anaerobic glycerol production by Saccharomyces cerevisiae strains under hyperosmotic stress,” Appl Microbiol Biotechnol 75:289-96 (2007). The concentration of these metabolites, however, was only sufficient to produce approximately half of the necessary NADH needed to balance the increase in glycerol. In a separate study, elevated levels of pyruvate, succinate, acetaldehyde, acetoin and 2,3-butanediol were observed in wine strains engineered to produce more glycerol. See Remize, D. F., et al., “Glycerol Overproduction by Engineered Saccharomyces cerevisiae Wine yeast Strains Leads to Substantial Changes in By-Product Formation and to a Stimulation of Fermentation Rate in Stationary Phase,” Appl. Environ. Microbiol. 65(1):143 (1999). The production of these compounds was reflected in the redox and carbon balance although the relationship was not elaborated upon.

[0010] The importance of reducing glycerol production is exemplified in the process of corn mash fermentation. About 16 billion gallons of corn-based ethanol are produced annually, so even small increases in ethanol yield, such as 5-10%, can translate into an extra billion or so gallons of ethanol over current yields. Industrial corn mash fermentation by S. cerevisiae typically results in approximately 5 g/L cells and glycerol yields ranging from 10-12 g/L. See Yang, R. D., et al., “Pilot plant studies of ethanol production from whole ground corn, corn flour, and starch,” Fuel Alcohol U.S.A., Feb. 13-16, 1982 (reported glycerol levels to be as high as 7.2% w/w of initial sugar consumed in normal corn mash fermentations or approximately 1.4 g/100 mL using 20% sugar). During anaerobic growth, it has been empirically determined in the literature that about 9-11 mM glycerol are formed per gram of dry cell weight (“DCW”), which is approximately a 1:1 mass ratio of glycerol to DCW (1 gram of glycerol is produced per gram of cells). The reducing power needed to make glycerol is available from the pool of surplus NADH generated from biosynthetic reactions. Based on the biomass and glycerol assumptions above, a minimum of 5 g/L glycerol is formed independent of anaerobic growth, presumably as part of the organisms osmotic stress response. By reducing or eliminating the glycerol yield in the production of ethanol from corn mash, for example, fermentation and re-engineering metabolic processes, increased ethanol yields can be achieved.

[0011] Additional benefits may be gained in the production of ethanol from corn. Corn mash is a nutrient rich medium, in some cases containing lipid and protein content that can be >3% of the total fermentation volume. As a result of the energy contained in these components, even higher ethanol yields may be achieved than what is predicted using, for example, pure sugar. The additional increases can come from the metabolism of lipids or amino acids in the corn mash medium. The recombinant cells and methods of the invention enable increasing ethanol yields from biomass fermentation by reducing or modulating glycerol production and regulation.

### BRIEF SUMMARY OF THE INVENTION

[0012] The invention is generally directed to the reduction or modulation of glycerol production in a host cell through engineering of the host cell to take up extracellular glycerol in the presence of glucose. The recombinant cells and methods of the invention enable cells to accumulate higher intracellular concentrations of glycerol to improve robustness and decrease the requirement to produce it as part of the stress response pathway. In contrast to other efforts to reduce or eliminate cellular glycerol production or to use glycerol as a fermentative substrate, the present invention uses existing glycerol present in fermentation medium to lower cellular glycerol production through glycerol uptake. Engineering of an alternate electron acceptor in the host cell for the regeneration of NAD⁺ may also be performed.

[0013] An aspect of the invention relates to a recombinant microorganism comprising: (a) one or more native and/or heterologous proteins that function to import glycerol into the recombinant microorganism, wherein said one or more native and/or heterologous proteins is activated, upregulated, or overexpressed; and (b) one or more native and/or heterologous enzymes that function in one or more engineered metabolic pathways to convert a carbohydrate source to an alcohol, wherein said one or more native and/or heterologous enzymes is activated, upregulated, overexpressed, or downregulated.

[0014] In certain embodiments, the recombinant microorganism produces less glycerol than a control recombinant microorganism without activation, upregulation, or overexpression of said one or more native and/or heterologous proteins that function to import glycerol.

[0015] In some embodiments, the one or more native and/or heterologous proteins that function to import glycerol is STL1. In certain embodiments, the STL1 is derived from S. cerevisiae. In some embodiments, the carbohydrate source is biomass.

[0016] In some aspects of the invention, the recombinant microorganism further comprises one or more native and/or heterologous proteins that function to export glycerol from the microorganism, wherein said one or more native and/or heterologous enzymes that function to export glycerol is activated, upregulated, or downregulated. In certain embodiments, the heterologous proteins that function to export glycerol from the microorganism are deleted. In some embodiments, the one or more native and/or heterologous proteins that function to export glycerol from the microorganism is FPS1. In certain embodiments, the activated or upregulated native and/or heterologous protein that functions to export glycerol from the microorganism is a constitutively active FPS1 (fps1-1).

[0017] In some aspects of the invention, the recombinant microorganism further comprises a deletion or downregulation of one or more native enzymes that function to produce glycerol and/or regulate glycerol synthesis. In certain embodiments, the one or more native enzymes that function to produce glycerol is encoded by a gpd1 polynucleotide, a gpd2 polynucleotide, or both a gpd1 polynucleotide and a gpd2 polynucleotide. In some embodiments, the recombinant microorganism further comprises a native and/or heterologous gpd1 polynucleotide operably linked to a native gpd2 promoter polynucleotide. In certain embodiments, the one or more native enzymes that function to produce glycerol is encoded by a gpp1 polynucleotide, a gpp2 polynucleotide, or both a gpp1 polynucleotide and a gpp2 polynucleotide.

[0018] In certain aspects of the invention, the one or more engineered metabolic pathways comprise conversion of acetyl-CoA to an alcohol. In some embodiments, the acetyl-CoA is converted to acetaldehyde by an acetaldehyde dehydrogenase, and the acetaldehyde is converted to an alcohol by an alcohol dehydrogenase. In certain embodiments, the acetyl-CoA is converted to an alcohol by a bifunctional acetaldehyde/alcohol dehydrogenase. In some embodiments, the acetaldehyde dehydrogenase, alcohol dehydrogenase, or bifunctional acetaldehyde/alcohol dehydrogenase is of prokaryotic or eukaryotic origin. In certain embodiments, the acetaldehyde dehydrogenase is from C. phytofermentans. In some embodiments, the bifunctional acetaldehyde/alcohol dehydrogenase is from an Escherichia, a Clostridia, a Chlamydomonas, a Piromyces, or a Bifidobacteria species. In certain embodiments, the bifunctional acetaldehyde/alcohol dehydrogenase is from Escherichia coli, Clostridium phytofermentans, Chlamydomonas reinhardtii, Piromyces sp. E2, or Bifidobacterium adolescentis. In some embodiments, the bifunctional acetaldehyde/alcohol dehydrogenase is from a Bifidobacterium adolescentis or Piromyces sp. E2.

[0019] In some aspects of the invention, the one or more engineered metabolic pathways comprise conversion of pyruvate to acetyl-CoA and formate. In certain embodiments, the pyruvate is converted to acetyl-CoA and formate by a pyruvate formate lyase (PFL). In some embodiments, the PFL is of prokaryotic or eukaryotic origin. In certain embodiments, the PFL is from one or more of a Bifidobacteria, an Escherichia, a Thermoanaerobacter, a Clostridia, a Streptococcus, a Lactobacillus, a Chlamydomonas, a Piromyces, a Neocallimastix, or a Bacillus species. In some embodiments, the PFL is from one or more of a Bacillus licheniformis, a Streptococcus thermophilus, a Lactobacillus plantarum, a Lactobacillus casei, a Bifidobacterium adolescentis, a Clostridium cellulolyticum, an Escherichia coli, a Chlamydomonas reinhardtii PflA, a Piromyces sp. E2, or a Neocallimastix frontalis. In some embodiments, the PFL is from a Bifidobacterium adolescentis. In some embodiments, the recombinant microorganism overexpresses a PflA and/or PflB.

[0020] In certain aspects of the invention, the one or more engineered metabolic pathways is the pentose phosphate pathway (PPP). In some embodiments, the one or more engineered metabolic pathways comprises the conversion of D-xylulose 5-phosphate to D-glyceraldehyde 3-phosphate or the conversion of D-fructose 6-phosphate to D-erythrose 4-phosphate. In certain embodiments, the D-xylulose 5-phosphate is converted to D-glyceraldehyde 3-phosphate by a phosphoketolase. In some embodiments, the phosphoketolase is a single-specificity phosphokelotase. In certain embodiments, the D-fructose 6-phosphate is converted to D-erythrose 4-phosphate by a phosphoketolase. In certain embodiments, the phosphoketolase is a dual-specificity phosphokelotase.

[0021] In certain aspects of the invention, the one or more engineered metabolic pathways comprises the conversion of acetate to acetyl-CoA. In some embodiments, the acetate is converted to acetyl-P by an acetate kinase, and wherein acetyl-P is converted to acetyl-CoA by a phosphotransacetylase. In certain embodiments, the acetate is converted to acetyl-CoA by an acetyl-CoA synthetase.

[0022] In some aspects of the invention, the one or more engineered metabolic pathways comprises one or more native and/or heterologous enzymes that encodes a saccharolytic enzyme. In certain embodiments, the saccharolytic enzyme is selected from the group consisting of amylases, cellulases, hemicellulases, cellulolytic and amylolytic accessory enzymes, inulinases, levanases, and pentose sugar utilizing enzymes. In some embodiments, the cellulase is xylanase. In certain embodiments, the saccharolytic enzyme is from a microorganism selected from the group consisting of H. grisea, T. aurantiacus, T. emersonii, T. reesei, C. lacteus, C. formosanus, N. takasagoensis, C. acinaciformis, M. danvinensis, N. walkeri, S. fibuligera, C. lucknowense R. speratus, Thermobfida fusca, Clostridum thermocellum, Clostridium cellulolyticum, Clostridum josui, Bacillus pumilis, Cellulomonas fimi, Saccharophagus degradans, Piromyces equii, Neocallimastix patricarum, Arabidopsis thaliana, and S. fibuligera. In some embodiments, the saccharolytic enzyme is a glucoamylase. In certain embodiments, the glucoamylase is S. fibuligera glucoamylase (glu-0111-CO). In some embodiments, the saccharolytic enzyme is a hemicellulase. The hemicellulase can be derived from any number of organisms, including but not limited to a microorganism selected from the group consisting of Neosartorya fischeri, Pyrenophora tritici-repentis, Aspergillus niger, Aspergillus fumigatus, Aspergillus oryzae, Trichoderma reesei, and Aspergillus aculeatus. Additional examples of hemicellulases that can be used in the present invention are described in co-owned International Application No. PCT/US2014/026499 filed Mar. 13, 2014, which is incorporated by reference in its entirety herein.

[0023] In certain aspects of the invention, the microorganism further comprises one or more native and/or heterologous enzymes that function in one or more engineered metabolic pathways to convert xylose to xylulose-5-phosphate and/or arabinose to xylulose-5-phosphate, wherein said one or more native and/or heterologous enzymes is activated, upregulated or downregulated. In some embodiments, the one or more native and/or heterologous enzymes that function to convert xylose to xylulose-5-phosphate is xylose isomerase. In certain embodiments, the one or more native and/or heterologous enzymes that function to convert arabinose to xylulose-5-phosphate is selected from the group consisting of arabinose isomerase, ribulokinase, and ribulose 5-phosphate epimerase.

[0024] In some embodiments, one or more engineered metabolic pathways comprises the conversion of trehalose to acetyl-CoA. In certain embodiments, the one or more native and/or heterologous enzymes functions to convert trehalose to glucose.

[0025] In certain aspects of the invention, the alcohol is ethanol or isopropanol. In some embodiments, the microorganism produces ethanol. In certain embodiments, the microorganism produces isopropanol.

[0026] In some aspects of the invention, the activation, upregulation, or overexpression of one or more native and/or heterologous proteins that function to import glycerol into the recombinant microorganism increases intracellular glycerol concentration. In certain embodiments, the recombinant microorganism increases intracellular glycerol by at least about 0.01 to 10 fold glycerol than is present in a recombinant microorganism without activation, upregulation, or overexpression of one or more native and/or heterologous proteins that function to import glycerol. In some embodiments, the recombinant microorganism increases intracellular glycerol by at least about 0.05 to 5 fold glycerol than is present in a recombinant microorganism without activation, upregulation, or overexpression of one or more native and/or heterologous proteins that function to import glycerol. In certain embodiments, the recombinant microorganism increases intracellular glycerol by at least about 0.1 to 2 fold glycerol than is present in a recombinant microorganism without activation, upregulation, or overexpression of one or more native and/or heterologous proteins that function to import glycerol.

[0027] In some embodiments, the recombinant microorganism increases intracellular glycerol by: (a) at least about 0.01-fold more intracellular glycerol than is present in a recombinant microorganism without activation, upregulation, or overexpression of one or more native and/or heterologous proteins that function to import glycerol; (b) at least about 0.05-fold more intracellular glycerol than is present in a recombinant microorganism without activation, upregulation, or overexpression of one or more native and/or heterologous proteins that function to import glycerol; (c) at least about 0.1-fold more intracellular glycerol than is present in a recombinant microorganism without activation, upregulation, or overexpression of one or more native and/or heterologous proteins that function to import glycerol; (d) at least about 0.2-fold more intracellular glycerol than is present in a recombinant microorganism without activation, upregulation, or overexpression of one or more native and/or heterologous proteins that function to import glycerol; (e) at least about 0.3-fold more intracellular glycerol than is present in a recombinant microorganism without activation, upregulation, or overexpression of one or more native and/or heterologous proteins that function to import glycerol; (f) at least about 0.4-fold more intracellular glycerol than is present in a recombinant microorganism without activation, upregulation, or overexpression of one or more native and/or heterologous proteins that function to import glycerol; (g) at least about 0.5-fold more intracellular glycerol than is present in a recombinant microorganism without activation, upregulation, or overexpression of one or more native and/or heterologous proteins that function to import glycerol; (h) at least about 0.6-fold more intracellular glycerol than is present in a recombinant microorganism without activation, upregulation, or overexpression of one or more native and/or heterologous proteins that function to import glycerol; (i) at least about 0.7-fold more intracellular glycerol than is present in a recombinant microorganism without activation, upregulation, or overexpression of one or more native and/or heterologous proteins that function to import glycerol; (j) at least about 0.8-fold more intracellular glycerol than is present in a recombinant microorganism without activation, upregulation, or overexpression of one or more native and/or heterologous proteins that function to import glycerol; (k) at least about 0.9-fold more intracellular glycerol than is present in a recombinant microorganism without activation, upregulation, or overexpression of one or more native and/or heterologous proteins that function to import glycerol; (l) at least about 1.0-fold more intracellular glycerol than is present in a recombinant microorganism without activation, upregulation, or overexpression of one or more native and/or heterologous proteins that function to import glycerol; (m) at least about 1.1-fold more intracellular glycerol than is present in a recombinant microorganism without activation, upregulation, or overexpression of one or more native and/or heterologous proteins that function to import glycerol; (n) at least about 1.2-fold more intracellular glycerol than is present in a recombinant microorganism without activation, upregulation, or overexpression of one or more native and/or heterologous proteins that function to import glycerol; (o) at least about 1.3-fold more intracellular glycerol than is present in a recombinant microorganism without activation, upregulation, or overexpression of one or more native and/or heterologous proteins that function to import glycerol; (p) at least about 1.4-fold more intracellular glycerol than is present in a recombinant microorganism without activation, upregulation, or overexpression of one or more native and/or heterologous proteins that function to import glycerol; (q) at least about 1.5-fold more intracellular glycerol than is present in a recombinant microorganism without activation, upregulation, or overexpression of one or more native and/or heterologous proteins that function to import glycerol; (r) at least about 1.6-fold more intracellular glycerol than is present in a recombinant microorganism without activation, upregulation, or overexpression of one or more native and/or heterologous proteins that function to import glycerol; (s) at least about 1.7-fold more intracellular glycerol than is present in a recombinant microorganism without activation, upregulation, or overexpression of one or more native and/or heterologous proteins that function to import glycerol; (t) at least about 1.8-fold more intracellular glycerol than is present in a recombinant microorganism without activation, upregulation, or overexpression of one or more native and/or heterologous proteins that function to import glycerol; (u) at least about 1.9-fold more intracellular glycerol than is present in a recombinant microorganism without activation, upregulation, or overexpression of one or more native and/or heterologous proteins that function to import glycerol; (v) at least about 2.0-fold more intracellular glycerol than is present in a recombinant microorganism without activation, upregulation, or overexpression of one or more native and/or heterologous proteins that function to import glycerol; (w) at least about 3.0-fold more intracellular glycerol than is present in a recombinant microorganism without activation, upregulation, or overexpression of one or more native and/or heterologous proteins that function to import glycerol; (x) at least about 4.0-fold more intracellular glycerol than is present in a recombinant microorganism without activation, upregulation, or overexpression of one or more native and/or heterologous proteins that function to import glycerol; (y) at least about 5.0-fold more intracellular glycerol than is present in a recombinant microorganism without activation, upregulation, or overexpression of one or more native and/or heterologous proteins that function to import glycerol; (z) at least about 6.0-fold more intracellular glycerol than is present in a recombinant microorganism without activation, upregulation, or overexpression of one or more native and/or heterologous proteins that function to import glycerol; (aa) at least about 7.0-fold more intracellular glycerol than is present in a recombinant microorganism without activation, upregulation, or overexpression of one or more native and/or heterologous proteins that function to import glycerol; (bb) at least about 8.0-fold more intracellular glycerol than is present in a recombinant microorganism without activation, upregulation, or overexpression of one or more native and/or heterologous proteins that function to import glycerol; (cc) at least about 9.0-fold more intracellular glycerol than is present in a recombinant microorganism without activation, upregulation, or overexpression of one or more native and/or heterologous proteins that function to import glycerol; or (dd) at least about 10.0-fold more intracellular glycerol than is present in a recombinant microorganism without activation, upregulation, or overexpression of one or more native and/or heterologous proteins that function to import glycerol.

[0028] In certain embodiments, the recombinant microorganism increases intracellular glycerol by: by: (a) at least about 0.05-fold more intracellular glycerol than is present in a recombinant microorganism without activation, upregulation, or overexpression of one or more native and/or heterologous proteins that function to import glycerol; (b) at least about 0.1-fold more intracellular glycerol than is present in a recombinant microorganism without activation, upregulation, or overexpression of one or more native and/or heterologous proteins that function to import glycerol; (c) at least about 0.5-fold more intracellular glycerol than is present in a recombinant microorganism without activation, upregulation, or overexpression of one or more native and/or heterologous proteins that function to import glycerol; (d) at least about 1.0-fold more intracellular glycerol than is present in a recombinant microorganism without activation, upregulation, or overexpression of one or more native and/or heterologous proteins that function to import glycerol; (e) at least about 1.5-fold more intracellular glycerol than is present in a recombinant microorganism without activation, upregulation, or overexpression of one or more native and/or heterologous proteins that function to import glycerol; or (f) at least about 1.7-fold more intracellular glycerol than is present in a recombinant microorganism without activation, upregulation, or overexpression of one or more native and/or heterologous proteins that function to import glycerol.

[0029] In certain embodiments, the activation, upregulation, or overexpression of one or more native and/or heterologous proteins that function to import glycerol into the recombinant microorganism reduces glycerol formation. In certain embodiments, the recombinant microorganism reduces glycerol formation by at least about 1% to 100% of the glycerol produced by a recombinant microorganism without activation, upregulation, or overexpression of one or more native and/or heterologous proteins that function to import glycerol. In some embodiments, the recombinant microorganism reduces glycerol formation by at least about 10% to 90% of the glycerol produced by a recombinant microorganism without activation, upregulation, or overexpression of one or more native and/or heterologous proteins that function to import glycerol. In some embodiments, the recombinant microorganism reduces glycerol formation by at least about 20% to 80% of the glycerol produced by a recombinant microorganism without activation, upregulation, or overexpression of one or more native and/or heterologous proteins that function to import glycerol. In some embodiments, the recombinant microorganism reduces glycerol formation by at least about 30% to 60% of the glycerol produced by a recombinant microorganism without activation, upregulation, or overexpression of one or more native and/or heterologous proteins that function to import glycerol. In some embodiments, the recombinant microorganism reduces glycerol formation by at least about 40% to 50% of the glycerol produced by a recombinant microorganism without activation, upregulation, or overexpression of one or more native and/or heterologous proteins that function to import glycerol.

[0030] In some embodiments, the recombinant microorganism reduces glycerol formation by: (a) more than about 1% of the glycerol produced by a recombinant microorganism without activation, upregulation, or overexpression of one or more native and/or heterologous proteins that function to import glycerol; (b) more than about 5% of the glycerol produced by a recombinant microorganism without activation, upregulation, or overexpression of one or more native and/or heterologous proteins that function to import glycerol; (c) more than about 10% of the glycerol produced by a recombinant microorganism without activation, upregulation, or overexpression of one or more native and/or heterologous proteins that function to import glycerol; (d) more than about 15% of the glycerol produced by a recombinant microorganism without activation, upregulation, or overexpression of one or more native and/or heterologous proteins that function to import glycerol; (e) more than about 20% of the glycerol produced by a recombinant microorganism without activation, upregulation, or overexpression of one or more native and/or heterologous proteins that function to import glycerol; (f) more than about 25% of the glycerol produced by a recombinant microorganism without activation, upregulation, or overexpression of one or more native and/or heterologous proteins that function to import glycerol; (g) more than about 30% of the glycerol produced by a recombinant microorganism without activation, upregulation, or overexpression of one or more native and/or heterologous proteins that function to import glycerol; (h) more than about 35% of the glycerol produced by a recombinant microorganism without activation, upregulation, or overexpression of one or more native and/or heterologous proteins that function to import glycerol; (i) more than about 40% of the glycerol produced by a recombinant microorganism without activation, upregulation, or overexpression of one or more native and/or heterologous proteins that function to import glycerol; (j) more than about 45% of the glycerol produced by a recombinant microorganism without activation, upregulation, or overexpression of one or more native and/or heterologous proteins that function to import glycerol; (k) more than about 50% of the glycerol produced by a recombinant microorganism without activation, upregulation, or overexpression of one or more native and/or heterologous proteins that function to import glycerol; (l) more than about 55% of the glycerol produced by a recombinant microorganism without activation, upregulation, or overexpression of one or more native and/or heterologous proteins that function to import glycerol; (m) more than about 60% of the glycerol produced by a recombinant microorganism without activation, upregulation, or overexpression of one or more native and/or heterologous proteins that function to import glycerol; (n) more than about 65% of the glycerol produced by a recombinant microorganism without activation, upregulation, or overexpression of one or more native and/or heterologous proteins that function to import glycerol; (o) more than about 70% of the glycerol produced by a recombinant microorganism without activation, upregulation, or overexpression of one or more native and/or heterologous proteins that function to import glycerol; (p) more than about 75% of the glycerol produced by a recombinant microorganism without activation, upregulation, or overexpression of one or more native and/or heterologous proteins that function to import glycerol; (q) more than about 80% of the glycerol produced by a recombinant microorganism without activation, upregulation, or overexpression of one or more native and/or heterologous proteins that function to import glycerol; (r) more than about 85% of the glycerol produced by a recombinant microorganism without activation, upregulation, or overexpression of one or more native and/or heterologous proteins that function to import glycerol; (s) more than about 90% of the glycerol produced by a recombinant microorganism without activation, upregulation, or overexpression of one or more native and/or heterologous proteins that function to import glycerol; (t) more than about 95% of the glycerol produced by a recombinant microorganism without activation, upregulation, or overexpression of one or more native and/or heterologous proteins that function to import glycerol; or (u) more than about 100% of the glycerol produced by a recombinant microorganism without activation, upregulation, or overexpression of one or more native and/or heterologous proteins that function to import glycerol.

[0031] In some embodiments, the recombinant microorganism reduces glycerol formation by: (a) more than about 5% of the glycerol produced by a recombinant microorganism without activation, upregulation, or overexpression of one or more native and/or heterologous proteins that function to import glycerol; (b) more than about 10% of the glycerol produced by a recombinant microorganism without activation, upregulation, or overexpression of one or more native and/or heterologous proteins that function to import glycerol; (c) more than about 15% of the glycerol produced by a recombinant microorganism without activation, upregulation, or overexpression of one or more native and/or heterologous proteins that function to import glycerol; (d) more than about 20% of the glycerol produced by a recombinant microorganism without activation, upregulation, or overexpression of one or more native and/or heterologous proteins that function to import glycerol; or (e) more than about 30% of the glycerol produced by a recombinant microorganism without activation, upregulation, or overexpression of one or more native and/or heterologous proteins that function to import glycerol.

[0032] In some embodiments, the one or more engineered metabolic pathways of the recombinant microorganism comprises conversion of pyruvate to acetyl-CoA and formate and the activation, upregulation, or overexpression of one or more native and/or heterologous proteins that function to import glycerol into the recombinant microorganism reduces glycerol formation.

[0033] In certain embodiments, the one or more engineered metabolic pathways comprises conversion of pyruvate to acetyl-CoA and formate and the recombinant microorganism reduces glycerol formation by at least about 1% to 100% of the glycerol produced by a recombinant microorganism without activation, upregulation, or overexpression of one or more native and/or heterologous proteins that function to import glycerol. In some embodiments, the one or more engineered metabolic pathways comprises conversion of pyruvate to acetyl-CoA and formate and the recombinant microorganism reduces glycerol formation by at least about 10% to 90% of the glycerol produced by a recombinant microorganism without activation, upregulation, or overexpression of one or more native and/or heterologous proteins that function to import glycerol. In some embodiments, the one or more engineered metabolic pathways comprises conversion of pyruvate to acetyl-CoA and formate and the recombinant microorganism reduces glycerol formation by at least about 20% to 80% of the glycerol produced by a recombinant microorganism without activation, upregulation, or overexpression of one or more native and/or heterologous proteins that function to import glycerol. In some embodiments, the one or more engineered metabolic pathways comprises conversion of pyruvate to acetyl-CoA and formate and the recombinant microorganism reduces glycerol formation by at least about 30% to 60% of the glycerol produced by a recombinant microorganism without activation, upregulation, or overexpression of one or more native and/or heterologous proteins that function to import glycerol. In some embodiments, the one or more engineered metabolic pathways comprises conversion of pyruvate to acetyl-CoA and formate and the recombinant microorganism reduces glycerol formation by at least about 40% to 50% of the glycerol produced by a recombinant microorganism without activation, upregulation, or overexpression of one or more native and/or heterologous proteins that function to import glycerol.

[0034] In some embodiments, the one or more engineered metabolic pathways comprises conversion of pyruvate to acetyl-CoA and formate and the recombinant microorganism reduces glycerol formation by: (a) more than about 1% of the glycerol produced by a recombinant microorganism without activation, upregulation, or overexpression of one or more native and/or heterologous proteins that function to import glycerol; (b) more than about 5% of the glycerol produced by a recombinant microorganism without activation, upregulation, or overexpression of one or more native and/or heterologous proteins that function to import glycerol; (c) more than about 10% of the glycerol produced by a recombinant microorganism without activation, upregulation, or overexpression of one or more native and/or heterologous proteins that function to import glycerol; (d) more than about 15% of the glycerol produced by a recombinant microorganism without activation, upregulation, or overexpression of one or more native and/or heterologous proteins that function to import glycerol; (e) more than about 20% of the glycerol produced by a recombinant microorganism without activation, upregulation, or overexpression of one or more native and/or heterologous proteins that function to import glycerol; (f) more than about 25% of the glycerol produced by a recombinant microorganism without activation, upregulation, or overexpression of one or more native and/or heterologous proteins that function to import glycerol; (g) more than about 30% of the glycerol produced by a recombinant microorganism without activation, upregulation, or overexpression of one or more native and/or heterologous proteins that function to import glycerol; (h) more than about 35% of the glycerol produced by a recombinant microorganism without activation, upregulation, or overexpression of one or more native and/or heterologous proteins that function to import glycerol; (i) more than about 40% of the glycerol produced by a recombinant microorganism without activation, upregulation, or overexpression of one or more native and/or heterologous proteins that function to import glycerol; (j) more than about 45% of the glycerol produced by a recombinant microorganism without activation, upregulation, or overexpression of one or more native and/or heterologous proteins that function to import glycerol; (k) more than about 50% of the glycerol produced by a recombinant microorganism without activation, upregulation, or overexpression of one or more native and/or heterologous proteins that function to import glycerol; (l) more than about 55% of the glycerol produced by a recombinant microorganism without activation, upregulation, or overexpression of one or more native and/or heterologous proteins that function to import glycerol; (m) more than about 60% of the glycerol produced by a recombinant microorganism without activation, upregulation, or overexpression of one or more native and/or heterologous proteins that function to import glycerol; (n) more than about 65% of the glycerol produced by a recombinant microorganism without activation, upregulation, or overexpression of one or more native and/or heterologous proteins that function to import glycerol; (o) more than about 70% of the glycerol produced by a recombinant microorganism without activation, upregulation, or overexpression of one or more native and/or heterologous proteins that function to import glycerol; (p) more than about 75% of the glycerol produced by a recombinant microorganism without activation, upregulation, or overexpression of one or more native and/or heterologous proteins that function to import glycerol; (q) more than about 80% of the glycerol produced by a recombinant microorganism without activation, upregulation, or overexpression of one or more native and/or heterologous proteins that function to import glycerol; (r) more than about 85% of the glycerol produced by a recombinant microorganism without activation, upregulation, or overexpression of one or more native and/or heterologous proteins that function to import glycerol; (s) more than about 90% of the glycerol produced by a recombinant microorganism without activation, upregulation, or overexpression of one or more native and/or heterologous proteins that function to import glycerol; (t) more than about 95% of the glycerol produced by a recombinant microorganism without activation, upregulation, or overexpression of one or more native and/or heterologous proteins that function to import glycerol; or (u) more than about 100% of the glycerol produced by a recombinant microorganism without activation, upregulation, or overexpression of one or more native and/or heterologous proteins that function to import glycerol.

[0035] In some embodiments, the one or more engineered metabolic pathways comprises conversion of pyruvate to acetyl-CoA and formate and the recombinant microorganism reduces glycerol formation by: (a) more than about 5% of the glycerol produced by a recombinant microorganism without activation, upregulation, or overexpression of one or more native and/or heterologous proteins that function to import glycerol; (b) more than about 10% of the glycerol produced by a recombinant microorganism without activation, upregulation, or overexpression of one or more native and/or heterologous proteins that function to import glycerol; (c) more than about 15% of the glycerol produced by a recombinant microorganism without activation, upregulation, or overexpression of one or more native and/or heterologous proteins that function to import glycerol; (d) more than about 20% of the glycerol produced by a recombinant microorganism without activation, upregulation, or overexpression of one or more native and/or heterologous proteins that function to import glycerol; (e) more than about 25% of the glycerol produced by a recombinant microorganism without activation, upregulation, or overexpression of one or more native and/or heterologous proteins that function to import glycerol; or (f) more than about 30% of the glycerol produced by a recombinant microorganism without activation, upregulation, or overexpression of one or more native and/or heterologous proteins that function to import glycerol.

[0036] In certain embodiments, the one or more engineered metabolic pathways of the recombinant microorganism comprises one or more native and/or heterologous enzymes that encodes a saccharolytic enzyme and the activation, upregulation, or overexpression of one or more native and/or heterologous proteins that function to import glycerol into the recombinant microorganism reduces glycerol formation.

[0037] In certain embodiments, the one or more engineered metabolic pathways of the recombinant microorganism comprises one or more native and/or heterologous enzymes that encodes a saccharolytic enzyme and the recombinant microorganism reduces glycerol formation by at least about 1% to 100% of the glycerol produced by a recombinant microorganism without activation, upregulation, or overexpression of one or more native and/or heterologous proteins that function to import glycerol. In some embodiments, the one or more engineered metabolic pathways of the recombinant microorganism comprises one or more native and/or heterologous enzymes that encodes a saccharolytic enzyme and the recombinant microorganism reduces glycerol formation by at least about 10% to 90% of the glycerol produced by a recombinant microorganism without activation, upregulation, or overexpression of one or more native and/or heterologous proteins that function to import glycerol. In some embodiments, the one or more engineered metabolic pathways of the recombinant microorganism comprises one or more native and/or heterologous enzymes that encodes a saccharolytic enzyme and the recombinant microorganism reduces glycerol formation by at least about 20% to 80% of the glycerol produced by a recombinant microorganism without activation, upregulation, or overexpression of one or more native and/or heterologous proteins that function to import glycerol. In some embodiments, the one or more engineered metabolic pathways of the recombinant microorganism comprises one or more native and/or heterologous enzymes that encodes a saccharolytic enzyme and the recombinant microorganism reduces glycerol formation by at least about 30% to 60% of the glycerol produced by a recombinant microorganism without activation, upregulation, or overexpression of one or more native and/or heterologous proteins that function to import glycerol. In some embodiments, the one or more engineered metabolic pathways of the recombinant microorganism comprises one or more native and/or heterologous enzymes that encodes a saccharolytic enzyme and the recombinant microorganism reduces glycerol formation by at least about 40% to 50% of the glycerol produced by a recombinant microorganism without activation, upregulation, or overexpression of one or more native and/or heterologous proteins that function to import glycerol.

[0038] In some embodiments, the one or more engineered metabolic pathways of the recombinant microorganism comprises one or more native and/or heterologous enzymes that encodes a saccharolytic enzyme and the recombinant microorganism reduces glycerol formation by: (a) more than about 1% of the glycerol produced by a recombinant microorganism without activation, upregulation, or overexpression of one or more native and/or heterologous proteins that function to import glycerol; (b) more than about 5% of the glycerol produced by a recombinant microorganism without activation, upregulation, or overexpression of one or more native and/or heterologous proteins that function to import glycerol; (c) more than about 10% of the glycerol produced by a recombinant microorganism without activation, upregulation, or overexpression of one or more native and/or heterologous proteins that function to import glycerol; (d) more than about 15% of the glycerol produced by a recombinant microorganism without activation, upregulation, or overexpression of one or more native and/or heterologous proteins that function to import glycerol; (e) more than about 20% of the glycerol produced by a recombinant microorganism without activation, upregulation, or overexpression of one or more native and/or heterologous proteins that function to import glycerol; (f) more than about 25% of the glycerol produced by a recombinant microorganism without activation, upregulation, or overexpression of one or more native and/or heterologous proteins that function to import glycerol; (g) more than about 30% of the glycerol produced by a recombinant microorganism without activation, upregulation, or overexpression of one or more native and/or heterologous proteins that function to import glycerol; (h) more than about 35% of the glycerol produced by a recombinant microorganism without activation, upregulation, or overexpression of one or more native and/or heterologous proteins that function to import glycerol; (i) more than about 40% of the glycerol produced by a recombinant microorganism without activation, upregulation, or overexpression of one or more native and/or heterologous proteins that function to import glycerol; (j) more than about 45% of the glycerol produced by a recombinant microorganism without activation, upregulation, or overexpression of one or more native and/or heterologous proteins that function to import glycerol; (k) more than about 50% of the glycerol produced by a recombinant microorganism without activation, upregulation, or overexpression of one or more native and/or heterologous proteins that function to import glycerol; (l) more than about 55% of the glycerol produced by a recombinant microorganism without activation, upregulation, or overexpression of one or more native and/or heterologous proteins that function to import glycerol; (m) more than about 60% of the glycerol produced by a recombinant microorganism without activation, upregulation, or overexpression of one or more native and/or heterologous proteins that function to import glycerol; (n) more than about 65% of the glycerol produced by a recombinant microorganism without activation, upregulation, or overexpression of one or more native and/or heterologous proteins that function to import glycerol; (o) more than about 70% of the glycerol produced by a recombinant microorganism without activation, upregulation, or overexpression of one or more native and/or heterologous proteins that function to import glycerol; (p) more than about 75% of the glycerol produced by a recombinant microorganism without activation, upregulation, or overexpression of one or more native and/or heterologous proteins that function to import glycerol; (q) more than about 80% of the glycerol produced by a recombinant microorganism without activation, upregulation, or overexpression of one or more native and/or heterologous proteins that function to import glycerol; (r) more than about 85% of the glycerol produced by a recombinant microorganism without activation, upregulation, or overexpression of one or more native and/or heterologous proteins that function to import glycerol; (s) more than about 90% of the glycerol produced by a recombinant microorganism without activation, upregulation, or overexpression of one or more native and/or heterologous proteins that function to import glycerol; (t) more than about 95% of the glycerol produced by a recombinant microorganism without activation, upregulation, or overexpression of one or more native and/or heterologous proteins that function to import glycerol; or (u) more than about 100% of the glycerol produced by a recombinant microorganism without activation, upregulation, or overexpression of one or more native and/or heterologous proteins that function to import glycerol.

[0039] In some embodiments, the one or more engineered metabolic pathways of the recombinant microorganism comprises one or more native and/or heterologous enzymes that encodes a saccharolytic enzyme and the recombinant microorganism reduces glycerol formation by: (a) more than about 5% of the glycerol produced by a recombinant microorganism without activation, upregulation, or overexpression of one or more native and/or heterologous proteins that function to import glycerol; (b) more than about 10% of the glycerol produced by a recombinant microorganism without activation, upregulation, or overexpression of one or more native and/or heterologous proteins that function to import glycerol; (c) more than about 15% of the glycerol produced by a recombinant microorganism without activation, upregulation, or overexpression of one or more native and/or heterologous proteins that function to import glycerol; (d) more than about 20% of the glycerol produced by a recombinant microorganism without activation, upregulation, or overexpression of one or more native and/or heterologous proteins that function to import glycerol; (e) more than about 25% of the glycerol produced by a recombinant microorganism without activation, upregulation, or overexpression of one or more native and/or heterologous proteins that function to import glycerol; or (f) more than about 30% of the glycerol produced by a recombinant microorganism without activation, upregulation, or overexpression of one or more native and/or heterologous proteins that function to import glycerol.

[0040] In some aspects of the invention, the activation, upregulation, or overexpression of one or more native and/or heterologous proteins that function to import glycerol into the recombinant microorganism increases ethanol yield.

[0041] In some embodiments, the activation, upregulation, or overexpression of one or more native and/or heterologous proteins that function to import glycerol into the recombinant microorganism increases ethanol yield by at least about 0.001-fold to 10-fold than is produced in a recombinant microorganism without activation, upregulation, or overexpression of one or more native and/or heterologous proteins that function to import glycerol. In certain embodiments, the activation, upregulation, or overexpression of one or more native and/or heterologous proteins that function to import glycerol into the recombinant microorganism increases ethanol yield by at least about 0.005-fold to 1.10-fold than is produced in a recombinant microorganism without activation, upregulation, or overexpression of one or more native and/or heterologous proteins that function to import glycerol. In certain embodiments, the activation, upregulation, or overexpression of one or more native and/or heterologous proteins that function to import glycerol into the recombinant microorganism increases ethanol yield by at least about 0.01-fold to 1.05-fold than is produced in a recombinant microorganism without activation, upregulation, or overexpression of one or more native and/or heterologous proteins that function to import glycerol. In some embodiments, the activation, upregulation, or overexpression of one or more native and/or heterologous proteins that function to import glycerol into the recombinant microorganism increases ethanol yield by at least about 0.05-fold to 1.0-fold than is produced in a recombinant microorganism without activation, upregulation, or overexpression of one or more native and/or heterologous proteins that function to import glycerol. In some embodiments, the activation, upregulation, or overexpression of one or more native and/or heterologous proteins that function to import glycerol into the recombinant microorganism increases ethanol yield by at least about 0.1-fold to 0.5-fold than is produced in a recombinant microorganism without activation, upregulation, or overexpression of one or more native and/or heterologous proteins that function to import glycerol.

[0042] In certain embodiments, the activation, upregulation, or overexpression of one or more native and/or heterologous proteins that function to import glycerol into the recombinant microorganism increases ethanol yield by: (a) at least about 0.005-fold more than is produced in a recombinant microorganism without activation, upregulation, or overexpression of one or more native and/or heterologous proteins that function to import glycerol; (b) at least about 0.01-fold more than is produced in a recombinant microorganism without activation, upregulation, or overexpression of one or more native and/or heterologous proteins that function to import glycerol; (c) at least about 0.05-fold more than is produced in a recombinant microorganism without activation, upregulation, or overexpression of one or more native and/or heterologous proteins that function to import glycerol; (d) at least about 0.1-fold more than is produced in a recombinant microorganism without activation, upregulation, or overexpression of one or more native and/or heterologous proteins that function to import glycerol; (e) at least about 0.2-fold more than is produced in a recombinant microorganism without activation, upregulation, or overexpression of one or more native and/or heterologous proteins that function to import glycerol; (f) at least about 0.3-fold more than is produced in a recombinant microorganism without activation, upregulation, or overexpression of one or more native and/or heterologous proteins that function to import glycerol; (g) at least about 0.4-fold more than is produced in a recombinant microorganism without activation, upregulation, or overexpression of one or more native and/or heterologous proteins that function to import glycerol; (h) at least about 0.5-fold more than is produced in a recombinant microorganism without activation, upregulation, or overexpression of one or more native and/or heterologous proteins that function to import glycerol; (i) at least about 0.6-fold more than is produced in a recombinant microorganism without activation, upregulation, or overexpression of one or more native and/or heterologous proteins that function to import glycerol; (j) at least about 0.7-fold more than is produced in a recombinant microorganism without activation, upregulation, or overexpression of one or more native and/or heterologous proteins that function to import glycerol; (k) at least about 0.8-fold more than is produced in a recombinant microorganism without activation, upregulation, or overexpression of one or more native and/or heterologous proteins that function to import glycerol; (l) at least about 0.9-fold more than is produced in a recombinant microorganism without activation, upregulation, or overexpression of one or more native and/or heterologous proteins that function to import glycerol; (m) at least about 1.0-fold more than is produced in a recombinant microorganism without activation, upregulation, or overexpression of one or more native and/or heterologous proteins that function to import glycerol; (n) at least about 1.05-fold more than is produced in a recombinant microorganism without activation, upregulation, or overexpression of one or more native and/or heterologous proteins that function to import glycerol; (o) at least about 1.10-fold more than is produced in a recombinant microorganism without activation, upregulation, or overexpression of one or more native and/or heterologous proteins that function to import glycerol; (p) at least about 2-fold more than is produced in a recombinant microorganism without activation, upregulation, or overexpression of one or more native and/or heterologous proteins that function to import glycerol; (q) at least about 5-fold more than is produced in a recombinant microorganism without activation, upregulation, or overexpression of one or more native and/or heterologous proteins that function to import glycerol; or r) at least about 10-fold more than is produced in a recombinant microorganism without activation, upregulation, or overexpression of one or more native and/or heterologous proteins that function to import glycerol.

[0043] In certain embodiments, the activation, upregulation, or overexpression of one or more native and/or heterologous proteins that function to import glycerol into the recombinant microorganism increases ethanol yield by: (a) at least about 0.005-fold more than is produced in a recombinant microorganism without activation, upregulation, or overexpression of one or more native and/or heterologous proteins that function to import glycerol; (b) at least about 0.01-fold more than is produced in a recombinant microorganism without activation, upregulation, or overexpression of one or more native and/or heterologous proteins that function to import glycerol; (c) at least about 0.05-fold more than is produced in a recombinant microorganism without activation, upregulation, or overexpression of one or more native and/or heterologous proteins that function to import glycerol; (d) at least about 0.1-fold more than is produced in a recombinant microorganism without activation, upregulation, or overexpression of one or more native and/or heterologous proteins that function to import glycerol; (e) at least about 0.5-fold more than is produced in a recombinant microorganism without activation, upregulation, or overexpression of one or more native and/or heterologous proteins that function to import glycerol; (f) at least about 1.0-fold more than is produced in a recombinant microorganism without activation, upregulation, or overexpression of one or more native and/or heterologous proteins that function to import glycerol; (g) at least about 1.05-fold more than is produced in a recombinant microorganism without activation, upregulation, or overexpression of one or more native and/or heterologous proteins that function to import glycerol; or (h) at least about 1.10-fold more than is produced in a recombinant microorganism without activation, upregulation, or overexpression of one or more native and/or heterologous proteins that function to import glycerol.

[0044] In certain embodiments, the one or more engineered metabolic pathways of the recombinant microorganism comprises conversion of pyruvate to acetyl-CoA and formate and the activation, upregulation, or overexpression of one or more native and/or heterologous proteins that function to import glycerol into the recombinant microorganism increases ethanol yield.

[0045] In some embodiments, the one or more engineered metabolic pathways of the recombinant microorganism comprises conversion of pyruvate to acetyl-CoA and formate and the activation, upregulation, or overexpression of one or more native and/or heterologous proteins that function to import glycerol into the recombinant microorganism increases ethanol yield by at least about 0.001-fold to 10-fold than is produced in a recombinant microorganism without activation, upregulation, or overexpression of one or more native and/or heterologous proteins that function to import glycerol. In certain embodiments, the one or more engineered metabolic pathways of the recombinant microorganism comprises conversion of pyruvate to acetyl-CoA and formate and the activation, upregulation, or overexpression of one or more native and/or heterologous proteins that function to import glycerol into the recombinant microorganism increases ethanol yield by at least about 0.005-fold to 1.10-fold than is produced in a recombinant microorganism without activation, upregulation, or overexpression of one or more native and/or heterologous proteins that function to import glycerol. In certain embodiments, the one or more engineered metabolic pathways of the recombinant microorganism comprises conversion of pyruvate to acetyl-CoA and formate and the activation, upregulation, or overexpression of one or more native and/or heterologous proteins that function to import glycerol into the recombinant microorganism increases ethanol yield by at least about 0.01-fold to 1.05-fold than is produced in a recombinant microorganism without activation, upregulation, or overexpression of one or more native and/or heterologous proteins that function to import glycerol. In some embodiments, the one or more engineered metabolic pathways of the recombinant microorganism comprises conversion of pyruvate to acetyl-CoA and formate and the activation, upregulation, or overexpression of one or more native and/or heterologous proteins that function to import glycerol into the recombinant microorganism increases ethanol yield by at least about 0.05-fold to 1.0-fold than is produced in a recombinant microorganism without activation, upregulation, or overexpression of one or more native and/or heterologous proteins that function to import glycerol. In some embodiments, the one or more engineered metabolic pathways of the recombinant microorganism comprises conversion of pyruvate to acetyl-CoA and formate and the activation, upregulation, or overexpression of one or more native and/or heterologous proteins that function to import glycerol into the recombinant microorganism increases ethanol yield by at least about 0.1-fold to 0.5-fold than is produced in a recombinant microorganism without activation, upregulation, or overexpression of one or more native and/or heterologous proteins that function to import glycerol.

[0046] In certain embodiments, the one or more engineered metabolic pathways of the recombinant microorganism comprises conversion of pyruvate to acetyl-CoA and formate and the activation, upregulation, or overexpression of one or more native and/or heterologous proteins that function to import glycerol into the recombinant microorganism increases ethanol yield by: (a) at least about 0.005-fold more than is produced in a recombinant microorganism without activation, upregulation, or overexpression of one or more native and/or heterologous proteins that function to import glycerol; (b) at least about 0.01-fold more than is produced in a recombinant microorganism without activation, upregulation, or overexpression of one or more native and/or heterologous proteins that function to import glycerol; (c) at least about 0.05-fold more than is produced in a recombinant microorganism without activation, upregulation, or overexpression of one or more native and/or heterologous proteins that function to import glycerol; (d) at least about 0.1-fold more than is produced in a recombinant microorganism without activation, upregulation, or overexpression of one or more native and/or heterologous proteins that function to import glycerol; (e) at least about 0.2-fold more than is produced in a recombinant microorganism without activation, upregulation, or overexpression of one or more native and/or heterologous proteins that function to import glycerol; (f) at least about 0.3-fold more than is produced in a recombinant microorganism without activation, upregulation, or overexpression of one or more native and/or heterologous proteins that function to import glycerol; (g) at least about 0.4-fold more than is produced in a recombinant microorganism without activation, upregulation, or overexpression of one or more native and/or heterologous proteins that function to import glycerol; (h) at least about 0.5-fold more than is produced in a recombinant microorganism without activation, upregulation, or overexpression of one or more native and/or heterologous proteins that function to import glycerol; (i) at least about 0.6-fold more than is produced in a recombinant microorganism without activation, upregulation, or overexpression of one or more native and/or heterologous proteins that function to import glycerol; (j) at least about 0.7-fold more than is produced in a recombinant microorganism without activation, upregulation, or overexpression of one or more native and/or heterologous proteins that function to import glycerol; (k) at least about 0.8-fold more than is produced in a recombinant microorganism without activation, upregulation, or overexpression of one or more native and/or heterologous proteins that function to import glycerol; (l) at least about 0.9-fold more than is produced in a recombinant microorganism without activation, upregulation, or overexpression of one or more native and/or heterologous proteins that function to import glycerol; (m) at least about 1.0-fold more than is produced in a recombinant microorganism without activation, upregulation, or overexpression of one or more native and/or heterologous proteins that function to import glycerol; (n) at least about 1.05-fold more than is produced in a recombinant microorganism without activation, upregulation, or overexpression of one or more native and/or heterologous proteins that function to import glycerol; (o) at least about 1.10-fold more than is produced in a recombinant microorganism without activation, upregulation, or overexpression of one or more native and/or heterologous proteins that function to import glycerol; (p) at least about 2-fold more than is produced in a recombinant microorganism without activation, upregulation, or overexpression of one or more native and/or heterologous proteins that function to import glycerol; (q) at least about 5-fold more than is produced in a recombinant microorganism without activation, upregulation, or overexpression of one or more native and/or heterologous proteins that function to import glycerol; or r) at least about 10-fold more than is produced in a recombinant microorganism without activation, upregulation, or overexpression of one or more native and/or heterologous proteins that function to import glycerol.

[0047] In certain embodiments, the one or more engineered metabolic pathways of the recombinant microorganism comprises conversion of pyruvate to acetyl-CoA and formate and the activation, upregulation, or overexpression of one or more native and/or heterologous proteins that function to import glycerol into the recombinant microorganism increases ethanol yield by: (a) at least about 0.005-fold more than is produced in a recombinant microorganism without activation, upregulation, or overexpression of one or more native and/or heterologous proteins that function to import glycerol; (b) at least about 0.01-fold more than is produced in a recombinant microorganism without activation, upregulation, or overexpression of one or more native and/or heterologous proteins that function to import glycerol; (c) at least about 0.05-fold more than is produced in a recombinant microorganism without activation, upregulation, or overexpression of one or more native and/or heterologous proteins that function to import glycerol; at least about 0.1-fold more than is produced in a recombinant microorganism without activation, upregulation, or overexpression of one or more native and/or heterologous proteins that function to import glycerol; (d) at least about 0.5-fold more than is produced in a recombinant microorganism without activation, upregulation, or overexpression of one or more native and/or heterologous proteins that function to import glycerol; (e) at least about 1.0-fold more than is produced in a recombinant microorganism without activation, upregulation, or overexpression of one or more native and/or heterologous proteins that function to import glycerol; or (f) at least about 1.02-fold more than is produced in a recombinant microorganism without activation, upregulation, or overexpression of one or more native and/or heterologous proteins that function to import glycerol.

[0048] In certain embodiments, the activation, upregulation, or overexpression of one or more native and/or heterologous proteins that function to import glycerol into the recombinant microorganism increases ethanol yield by: (a) at least about 0.005-fold more than is produced in a recombinant microorganism without activation, upregulation, or overexpression of one or more native and/or heterologous proteins that function to import glycerol; (b) at least about 0.01-fold more than is produced in a recombinant microorganism without activation, upregulation, or overexpression of one or more native and/or heterologous proteins that function to import glycerol; (c) at least about 0.05-fold more than is produced in a recombinant microorganism without activation, upregulation, or overexpression of one or more native and/or heterologous proteins that function to import glycerol; (d) at least about 0.1-fold more than is produced in a recombinant microorganism without activation, upregulation, or overexpression of one or more native and/or heterologous proteins that function to import glycerol; (e) at least about 0.5-fold more than is produced in a recombinant microorganism without activation, upregulation, or overexpression of one or more native and/or heterologous proteins that function to import glycerol; (f) at least about 1.0-fold more than is produced in a recombinant microorganism without activation, upregulation, or overexpression of one or more native and/or heterologous proteins that function to import glycerol; or (g) at least about 1.02-fold more than is produced in a recombinant microorganism without activation, upregulation, or overexpression of one or more native and/or heterologous proteins that function to import glycerol.

[0049] In certain aspects, the recombinant microorganism further comprises one or more native and/or heterologous proteins that function to export glycerol from the microorganism, wherein said one or more native proteins that function to export glycerol is downregulated or deleted and is encoded by fps1.

[0050] In some embodiments, the recombinant microorganism further comprises one or more native and/or heterologous proteins that function to export glycerol from the microorganism, wherein said one or more native proteins that function to export glycerol is activated or upregulated and is encoded by a constitutively active FPS1 (fps1-1).

[0051] In certain embodiments, the recombinant microorganism further comprises one or more native enzymes that function to produce glycerol, wherein said one or more native enzymes that function to produce glycerol is downregulated or deleted and is encoded by a gpd1 polynucleotide, a gpd2 polynucleotide, or both a gpd1 polynucleotide and a gpd2 polynucleotide. Eukaryotic GPD sequences include: S. cerevisiae gpd1 (SEQ ID NOs: 206 and 207) and S. cerevisiae gpd2 (SEQ ID NOs: 204 and 205).

[0052] In some embodiments, the recombinant microorganism further comprises one or more native enzymes that function to catabolize glycerol. In certain embodiments, the recombinant microorganism overexpresses a glycerol dehydrogenase gene. In certain embodiments, the glycerol dehydrogenase gene encodes a protein having glycerol dehydrogenase activity. Glycerol dehydrogenase includes those enzymes that correspond to Enzyme Commission Number 1.1.1.6. In one embodiment, the glycerol dehydrogenase gene is GCY1 (SEQ ID NOs: 214 and 215).

[0053] In some aspects of the invention, the one or more engineered metabolic pathways comprises conversion of acetyl-CoA to an alcohol, and wherein said acetyl-CoA is converted to an alcohol by a bifunctional acetaldehyde/alcohol dehydrogenase. In some embodiments, the one or more engineered metabolic pathways comprises conversion of pyruvate to acetyl-CoA and formate, and wherein said pyruvate is converted to acetyl-CoA and formate by a pyruvate formate lyase (PFL).

[0054] In certain embodiments, the one or more engineered metabolic pathway comprises the conversion of D-xylulose 5-phosphate to D-glyceraldehyde 3-phosphate or the conversion of D-fructose 6-phosphate to D-erythrose 4-phosphate, and wherein said conversion of D-xylulose 5-phosphate to D-glyceraldehyde 3-phosphate or the conversion of D-fructose 6-phosphate to D-erythrose 4-phosphate is performed by phosphokelotase. In some embodiments, the one or more engineered metabolic pathways comprises the conversion of acetate to acetyl-CoA, wherein said acetate is converted to acetyl-P by an acetate kinase, and wherein acetyl-P is converted to acetyl-CoA by a phosphotransacetylase. In some embodiments, the acetate kinase can be of prokaryotic or eukaryotic origin. In one embodiment, the acetate kinase is derived from Bifidobacterium species, such as from Bifidobacterium adolescentis. In another embodiment, the acetate kinase is derived from Leuconostoc such as, for example, Leuconostoc mesenteroides. In still another embodiment, the acetate kinase is derived from Oenococcus sp., such as, for example, Oenococcus oenii. In certain embodiments, the acetate kinase is derived from other prokaryotes such as Escherichia species, such as, for example, Escherichia coli. In one other embodiment, the acetate kinase is derived from Lactobacillus species. In a further embodiment, the acetate kinase is derived from Bacillus species, such as, for example, from Bacillus subtilis. In another embodiment, the acetate kinase is derived from Clostridium species, such as, for example, from Clostridium acetobutylicum. In still another embodiment, the acetate kinase is derived from Salmonella species, such as, for example, from Salmonella enterica. In certain embodiments the acetate kinase is derived from a eukaryotic source. In an embodiment, the acetate kinase can be derived from Aspergillus species, such as, for example, Aspergillus nidulans. In another embodiment, the acetate kinase can be derived from Phytophthora species, such as, for example, Phytophthora ramorum. In a further embodiment, the acetate kinase can be derived from Chlamydomonas species, such as, for example Chlamydomonas reinhardtii. In certain embodiments, the phosphotransacetylase is derived from a eukaryotic source such as Phytophthora species, Chlamydomonas species, Globisporangium species for example, Phytophthora ramorum, Phytophthora cactorum, Phytophthora parasitica, Phytophthora idaei, Chlamydomonas reinhardtii or Globisporangium splendens. In additional embodiments, the phosphotransacetylase can be of prokaryotic source such as Clostridium sp., Bifidobacterium sp., Leuconostoc sp., Oenococcus sp., Microcystis species, Holophagae species for example, Clostridium cellulolyticum, Clostridium phytofermentans, Bifidobacterium bifidum, Bifidobacterium animalis, Bifidobacterium adolescentis, Leuconostoc mesenteroides, Oenococcus oenii, Microcystis aeruginosa or Holophagae bacterium. In certain embodiments, the one or more engineered metabolic pathways comprises the conversion of acetate to acetyl-CoA, wherein said acetate is converted to acetyl-CoA by an acetyl-CoA synthetase. In some embodiments, the acetyl-CoA synthetase can be of prokaryotic or of eukaryotic origin. In additional embodiments, the acetyl-CoA synthetase is derived from Saccharomyces species, such as, for example, from Saccharomyces cerevisiae (acs2 gene for example). In some further embodiments, the acetyl-CoA synthetase is from Salmonella species, such as, for example, Salmonella enterica.). In some further embodiments, the acetyl-CoA synthetase is from Zygosaccharomyces species, such as, for example, Zygosaccharomyces bailii. In some further embodiments, the acetyl-CoA synthetase is from Acetobacter species, such as, for example, Acetobacter aceti.

[0055] In some aspects of the invention, the one or more engineered metabolic pathways comprises one or more native and/or heterologous enzymes that encodes a saccharolytic enzyme, and wherein said saccharolytic enzyme is glucoamylase.

[0056] In some aspects of the invention, the recombinant microorganism further comprises one or more native and/or heterologous enzymes that function in one or more engineered metabolic pathways to convert xylose to xylulose-5-phosphate, and wherein xylose is converted to xylulose-5-phosphate by xylose isomerase. In certain embodiments, the one or more engineered metabolic pathway is the pentose phosphate pathway (PPP).

[0057] In some aspects of the invention, the recombinant microorganism further comprises one or more native and/or heterologous enzymes that function in one or more engineered metabolic pathways to convert arabinose to xylulose-5-phosphate, and wherein arabinose is converted to xylulose-5-phosphate by arabinose isomerase, ribulokinase, or ribulose 5-phosphate epimerase.

[0058] In some embodiments, the recombinant microorganism further comprises one or more native enzymes that function to produce glycerol, wherein said one or more native enzymes that function to produce glycerol is downregulated or deleted and is encoded by a gpp1 polynucleotide, a gpp2 polynucleotide, or both a gpp1 polynucleotide and a gpp2 polynucleotide.

[0059] In certain aspects of the invention, the one or more engineered metabolic pathways comprises the conversion of trehalose to acetyl-CoA, and wherein said one or more native and/or heterologous enzymes functions to convert trehalose to glucose. In some embodiments, the one or more engineered metabolic pathways comprises one or more native and/or heterologous enzymes that encodes a saccharolytic enzyme, and wherein said saccharolytic enzyme is cellulase. In certain embodiments, the one or more engineered metabolic pathways comprises one or more native and/or heterologous enzymes that encodes a saccharolytic enzyme, and wherein said saccharolytic enzyme is xylanase.

[0060] In certain aspects of the invention, the recombinant microorganism is a thermophilic or mesophilic bacterium. In some embodiments, the thermophilic or mesophilic bacterium is a species of the genera Thermoanaerobacterium, Thermoanaerobacter, Clostridium, Geobacillus, Saccharococcus, Paenibacillus, Bacillus, Caldicellulosiruptor, Anaerocellum, or Anoxybacillus. In certain embodiments, the microorganism is a bacterium selected from the group consisting of: Thermoanaerobacterium thermosulfurigenes, Thermoanaerobacterium aotearoense, Thermoanaerobacterium polysaccharolyticum, Thermoanaerobacterium zeae, Thermoanaerobacterium xylanolyticum, Thermoanaerobacterium saccharolyticum, Thermoanaerobium brockii, Thermoanaerobacterium thermosaccharolyticum, Thermoanaerobacter thermohydrosulfuricus, Thermoanaerobacter ethanolicus, Thermoanaerobacter brocki, Clostridium thermocellum, Clostridium cellulolyticum, Clostridium phytofermentans, Clostridium straminosolvens, Geobacillus thermoglucosidasius, Geobacillus stearothermophilus, Saccharococcus caldoxylosilyticus, Saccharoccus thermophilus, Paenibacillus campinasensis, Bacillus flavothermus, Anoxybacillus kamchatkensis, Anoxybacillus gonensis, Caldicellulosiruptor acetigenus, Caldicellulosiruptor saccharolyticus, Caldicellulosiruptor kristjanssonii, Caldicellulosiruptor owensensis, Caldicellulosiruptor lactoaceticus, and Anaerocellum thermophilum. In certain embodiments, the microorganism is selected from the group consisting of Clostridium thermocellum, and Thermoanaerobacterium saccharolyticum.

[0061] In some embodiments, the recombinant microorganism is a yeast. In certain embodiments, the yeast is selected from the group consisting of Saccharomyces cerevisiae, Kluyveromyces lactis, Kluyveromyces marxianus, Pichia pastoris, Yarrowia lipolytica, Hansenula polymorpha, Phaffia rhodozyma, Candida utliis, Arxula adeninivorans, Pichia stipitis, Debaryomyces hansenii, Debaryomyces polymorphus, Schizosaccharomyces pombe, Candida albicans, and Schwanniomyces occidentalis. In some embodiments, the yeast is Saccharomyces cerevisiae.

[0062] Another aspect of the invention is a method for decreasing cellular-produced glycerol comprising contacting biomass with a recombinant microorganism of the invention. An aspect of the invention is a process for converting biomass to ethanol comprising contacting biomass with a recombinant microorganism of the invention.

[0063] Another aspect of the invention is a process for converting biomass to isopropanol comprising contacting biomass with a recombinant microorganism of the invention. In certain embodiments of these methods and processes, the biomass comprises lignocellulosic biomass. In some embodiments, the lignocellulosic biomass is selected from the group consisting of grass, switch grass, cord grass, rye grass, reed canary grass, mixed prairie grass, miscanthus, sugar-processing residues, sugarcane bagasse, sugarcane straw, agricultural wastes, rice straw, rice hulls, barley straw, corn cobs, cereal straw, wheat straw, canola straw, oat straw, oat hulls, corn fiber, stover, soybean stover, corn stover, forestry wastes, recycled wood pulp fiber, paper sludge, sawdust, hardwood, softwood, agave, and combinations thereof. In certain embodiments, the biomass is corn mash or corn starch.

[0064] In some embodiments of the invention, one of the engineered metabolic pathways comprises (a) conversion of acetyl-CoA to acetoacetyl-CoA; (b) conversion of acetoacetyl-CoA to acetoacetate; (c) conversion of acetoacetate to acetone; and (d) conversion of acetone to isopropanol. In some embodiments, the acetyl-CoA is converted to acetoacetyl-CoA by a thiolase. In embodiments, the thiolase can be of prokaryotic or eukaryotic origin. In some specific embodiments, the thiolase is encoded by a thl (including a thlA1), erg10, or a phaA gene. In some additional embodiments, the thiolase is derived from Clostridium, Saccharomyces, Cupriavidus, Clostridium, Yarrowia, Thermoanaerobacterium, Saccoglossus, Strongylocentrotus or Paenibacillus species, such as, for example, from Clostridium acetobutylicum (thl gene for example), Saccharomyces cerevisiae (erg10 gene for example), Cupriavidus necator (phaA gene for example), Clostridium acetobutylicum (thl gene for example), Clostridium kluyveri (thlA1 gene for example), Yarrowia lipolytica (thl gene for example), Thermoanaerobacterium thermosaccharolyticum (thl gene for example), Saccoglossus kowalevskii (thl gene for example), Strongylocentrotus purpuratus (thl gene for example) or Paenibacillus polymyxa (thl gene for example). In still another embodiment, the thiolase has the amino acid sequence of SEQ ID NO: 230, 241, 242, 243, 244, 245, 246, 247 or 248. In certain embodiments, the acetoacetyl-CoA is converted to acetoacetate by a CoA transferase. In embodiments, the CoA transferase can be of prokaryotic or of eukatyotic origin. In some embodiments, the CoA transferase is encoded by a ctfA and/or cftB or a atoD and/or atoA gene. In yet additional embodiments, the CoA transferase is derived from Clostridium, Thermosipho, Escherichia, Paenibacillus, Alkaliphilus, or Brevibacillus species and in yet further embodiment, the CoA transferase is derived from Clostridium acetobutylicum (ctfA and/or ctfB gene(s) for example), Thermosipho melanesiensis (ctfA and/or B gene(s) for example), Escherichia coli (atoD and/or atoA gene(s) for example), Paenibacillus polymyxa (ctfA and/or cftB gene(s) for example), Clostridium beijerinckii (ctfA and/or cftB gene(s) for example), Clostridium saccharoperbutylacetonicum (ctfA and/or cftB gene(s) for example), Clostridium sticklandii (atoD and/or atoA gene(s) for example), Alkaliphilus metalliredigens (ctfA and/or cftB gene(s) for example), or Brevibacillus laterosporus (ctfA and/or cftB gene(s) for example). In some embodiments, the CoA transferase has the amino acid sequence of SEQ ID NO: 234, 235, 249, 250, 251, 252, 253, 254, 255, 256, 257, 258, 259, 260, 261, 262, 263, or 264. In some embodiments, the acetoacetate is converted to acetone by an acetoacetate decarboxylase. In embodiments, the acetoacetate decarboxylase is of prokaryotic or of eukaryotic origin. In some embodiments, the acetoacetate decarboxylase is encoded by a adc gene. In some further embodiments, the acetoacetate decarboxylase is derived from Clostridium, Bacillus, Lactobacillus, Rhizobium, Bradyrhizobium, Tetrahymena, Aspergillus, Phytomonas or Paenibacillus species and in yet further embodiments from Clostridium acetobutylicum (adc gene for example), Clostridium beijerinckii (adc gene for example), Bacillus amyloliquefaciens (adc gene for example), Lactobacillus casei (adc gene for example), Rhizobium leguminosarum bv. Trifolii (adc gene for example), Bradyrhizobium japonicum (adc gene for example), Tetrahymena thermophile (adc gene for example), Aspergillus niger (adc gene for example) or Paenibacillus polymyxa (adc gene for example). In additional embodiments, the acetoacetate decarboxylase has the amino acid sequence of SEQ ID NO: 236, 265, 266, 267, 268, 269, 270 or 271. In certain embodiments, the acetone is converted to isopropanol by an alcohol dehydrogenase. In some embodiments, the alcohol dehydrogenase is a bifunctional acetaldehyde/alcohol dehydrogenase. In certain embodiments, the bifunctional acetaldehyde/alcohol dehydrogenase is of prokaryotic or eukaryotic origin. In some embodiments, the bifunctional acetaldehyde/alcohol dehydrogenase is from an Escherichia, a Clostridia, a Chlamydomonas, a Piromyces, or a Bifidobacteria species. In certain embodiments, the bifunctional acetaldehyde/alcohol dehydrogenase is from Escherichia coli (adhe gene for example), Clostridium phytofermentans, Chlamydomonas reinhardtii (sadh gene for example), Piromyces sp. E2, or Bifidobacterium adolescentis. In some embodiments, the bifunctional acetaldehyde/alcohol dehydrogenase is from a Bifidobacterium adolescentis or Piromyces sp. E2. In some embodiments of the invention, the recombinant microorganism is an S. cerevisiae of strain PE-2. In certain embodiments, the PE-2 strain comprises a deletion or disruption of one or more endogenous genes selected from the group consisting of GPD1, GPD2, FDH1, FDH2, and any combination thereof. In certain embodiments, the PE-2 strain comprises a deletion or disruption of an aldose reductase gene, e.g., GRE3. In some embodiments, the PE-2 strain overexpresses one or more genes selected from the group consisting of AdhE, PflA, PlfB, STL1, GCY1, and DAK1. In some embodiments, the AdhE, PflA, and PflB are from Bifidobacterium adolescentis. In some embodiments, the PE-2 strain overexpresses a hemicellulase and/or a gene encoding a protein of the xylose fermentation pathway. In some embodiments, the gene encoding a protein of the xylose fermentation pathway is selected from the group consisting of xylose isomerase (XylA), xylulokinase (XKS1), transketolase (TKL2), transaldolase (TAL1), and any combination thereof. In some embodiments, the xylose isomerase can be any protein that catalyzes the reaction of converting xylose to xylulose, including those enzymes that correspond to Enzyme Commission number 5.3.1.5, and including but not limited to a xylose isomerase from a microorganism selected from Piromyces sp. or B. thetaiotaomicron. In certain embodiments, the hemicellulase is from a microorganism selected from the group consisting of H. grisea, T aurantiacus, T emersonii, T reesei, C. lacteus, C. formosanus, N. takasagoensis, C. acinaciformis, M. darwinensis, N. walkeri, S. fibuligera, C. lucknowense R. speratus, Thermobfida fusca, Clostridum thermocellum, Clostridium cellulolyticum, Clostridum josui, Bacillus pumilis, Cellulomonas fimi, Saccharophagus degradans, Piromyces equii, Neocallimastix patricarum, Arabidopsis thaliana, and S. fibuligera. In some embodiments, the hemicellulase is from a microorganism selected from the group consisting of Neosartorya fischeri, Pyrenophora tritici-repentis, Aspergillus niger, Aspergillus fumigatus, Aspergillus oryzae, Trichoderma reesei, and Aspergillus Aculeatus.

### BRIEF DESCRIPTION OF THE DRAWINGS/FIGURES

[0065] FIG. 1 is an overview of glycerol recycling.

[0066] FIGS. 2A and 2B depict glycerol and ethanol concentrations, respectively, in strains of the invention following fermentation in YMD280 medium.

[0067] FIGS. 3A, 3B, and 3C depict ethanol, glycerol, and glucose concentrations, respectively, in strains of the invention following fermentation in YMD-300 medium.

[0068] FIG. 4 depicts intracellular glycerol concentration in strains of the invention.

[0069] FIGS. 5A and 5B depict glycerol and ethanol titers, respectively, of strains of the invention after 72 hours of fermentation on industrial corn mash.

[0070] FIGS. 6A and 6B depict ethanol and glycerol titers, respectively, of the strains of the invention after 68 hours of fermentation on 33% solids corn mash.

[0071] FIGS. 7A and 7B depict ethanol and glycerol titers, respectively, of strains of the invention after 72 hours of fermentation on 33% solids corn mash.

[0072] FIGS. 8A and 8B depict ethanol and glycerol titers, respectively, of strains of the invention after 68 hours of fermentation on 33% solids corn mash.

[0073] FIG. 9 shows a schematic for integration of STL1 into the FCY1 locus.

[0074] FIG. 10 shows a schematic for integration of STL1 into the STL1 locus.

[0075] FIG. 11 shows a pathway for the recombinant production of ethanol.

[0076] FIG. 12 shows a pathway for the recombinant production of isopropanol.

[0077] FIG. 13 shows a tree depicting the relation of the PE-2-derived STL1 overexpressing strains M7772, M9208, and M9725 to M7101.

[0078] FIG. 14 shows a vector map of pMU228.

[0079] FIG. 15 shows a schematic for integration of STL1 into the FCY1 locus in creating strain M7772.

[0080] FIGS. 16A and B depict ethanol and glycerol titers of STL1 overexpressing PE-2 strains.

[0081] FIGS. 17A-D depict ethanol and glycerol titers as well as cell viability and mass accumulation of wild-type parent strain M7101 and S. cerevisiae STL1 overexpressing strain M7772.

[0082] FIG. 18 depicts ethanol, acetate, residual glucose, glycerol, isopropanol (IPA) and acetone amounts of strains expressing various components of the isopropanol production pathway.

[0083] FIG. 19 depicts residual glucose, ethanol, acetate, glycerol, isopropanol (IPA) and acetone amounts of strains expressing various components of the isopropanol production pathway.

[0084] FIG. 20 depicts residual glucose, ethanol, acetate, glycerol, isopropanol (IPA) and acetone amounts of strains expressing various components of the isopropanol production pathway.

[0085] FIG. 21 depicts residual glucose, ethanol, acetate, glycerol, isopropanol (IPA) and acetone amounts of strains expressing various components of the isopropanol production pathway.

### DETAILED DESCRIPTION OF THE INVENTION

### Definitions

[0086] Unless defined otherwise, all technical and scientific terms used herein have the same meaning as commonly understood by one of ordinary skill in the art to which this invention belongs. Also, unless otherwise required by context, singular terms shall include pluralities and plural terms shall include the singular. All publications, patents and other references mentioned herein are incorporated by reference in their entireties for all purposes.

[0087] The term “heterologous” when used in reference to a polynucleotide, a gene, a polypeptide, or an enzyme refers to a polynucleotide, gene, polypeptide, or an enzyme not normally found in the host organism. “Heterologous” also includes a native coding region, or portion thereof, that is reintroduced into the source organism in a form that is different from the corresponding native gene, e.g., not in its natural location in the organism's genome. The heterologous polynucleotide or gene may be introduced into the host organism by, e.g., gene transfer. A heterologous gene may include a native coding region that is a portion of a chimeric gene including non-native regulatory regions that is reintroduced into the native host. Foreign genes can comprise native genes inserted into a non-native organism, or chimeric genes.

[0088] The term “heterologous polynucleotide” is intended to include a polynucleotide that encodes one or more polypeptides or portions or fragments of polypeptides. A heterologous polynucleotide may be derived from any source, e.g., eukaryotes, prokaryotes, viruses, or synthetic polynucleotide fragments.

[0089] The terms “promoter” or “surrogate promoter” is intended to include a polynucleotide that can transcriptionally control a gene-of-interest that it does not transcriptionally control in nature. In certain embodiments, the transcriptional control of a surrogate promoter results in an increase in expression of the gene-of-interest. In certain embodiments, a surrogate promoter is placed 5′ to the gene-of-interest. A surrogate promoter may be used to replace the natural promoter, or may be used in addition to the natural promoter. A surrogate promoter may be endogenous with regard to the host cell in which it is used, or it may be a heterologous polynucleotide sequence introduced into the host cell, e.g., exogenous with regard to the host cell in which it is used.

[0090] The terms “gene(s)” or “polynucleotide” or “polynucleotide sequence(s)” are intended to include nucleic acid molecules, e.g., polynucleotides which include an open reading frame encoding a polypeptide, and can further include non-coding regulatory sequences, and introns. In addition, the terms are intended to include one or more genes that map to a functional locus. In addition, the terms are intended to include a specific gene for a selected purpose. The gene may be endogenous to the host cell or may be recombinantly introduced into the host cell, e.g., as a plasmid maintained episomally or a plasmid (or fragment thereof) that is stably integrated into the genome. In addition to the plasmid form, a gene may, for example, be in the form of linear DNA. In certain embodiments, the gene or polynucleotide is involved in at least one step in the bioconversion of biomass to, e.g., ethanol. Accordingly, the term is intended to include any gene encoding a polypeptide, such as the enzymes acetate kinase (ACK), phosphotransacetylase (PTA), lactate dehydrogenase (LDH), pyruvate formate lyase (PFL), aldehyde dehydrogenase (ADH) and/or alcohol dehydrogenase (ADH), acetyl-CoA transferase (ACS), acetaldehyde dehydrogenase (ACDH), acetaldehyde/alcohol dehydrogenase (AADH), glycerol-3-phosphate dehydrogenase (GPD), glycerol 3-phosphatase (GPP), acetyl-CoA synthetase, thiolase, CoA transferase, acetoacetate decarboxylase, alcohol acetyltransferase enzymes in the D-xylose pathway, such as xylose isomerase and xylulokinase, enzymes in the L-arabinose pathway, such as L-arabinose isomerase and L-ribulose-5-phosphate 4-epimerase. The term gene is also intended to cover all copies of a particular gene, e.g., all of the DNA sequences in a cell encoding a particular gene product.

[0091] The term “transcriptional control” is intended to include the ability to modulate gene expression at the level of transcription. In certain embodiments, transcription, and thus gene expression, is modulated by replacing or adding a surrogate promoter near the 5′ end of the coding region of a gene-of-interest, thereby resulting in altered gene expression. In certain embodiments, the transcriptional control of one or more genes is engineered to result in the optimal expression of such genes, e.g., in a desired ratio. The term also includes inducible transcriptional control as recognized in the art.

[0092] The term “expression” is intended to include the expression of a gene at least at the level of mRNA production.

[0093] The term “expression product” is intended to include the resultant product, e.g., a polypeptide, of an expressed gene.

[0094] The term “increased expression” and “overexpression” are used interchangeably and are intended to include an alteration in gene expression at least at the level of increased mRNA production and, preferably, at the level of polypeptide expression. The term “increased production” is intended to include an increase in the amount of a polypeptide expressed, in the level of the enzymatic activity of the polypeptide, or a combination thereof, as compared to the native production of, or the enzymatic activity, of the polypeptide.

[0095] The terms “activity,” “activities,” “enzymatic activity,” and “enzymatic activities” are used interchangeably and are intended to include any functional activity normally attributed to a selected polypeptide when produced under favorable conditions. Typically, the activity of a selected polypeptide encompasses the total enzymatic activity associated with the produced polypeptide. The polypeptide produced by a host cell and having enzymatic activity may be located in the intracellular space of the cell, cell-associated, secreted into the extracellular milieu, or a combination thereof. Techniques for determining total activity as compared to secreted activity are described herein and are known in the art.

[0096] The term “xylanolytic activity” is intended to include the ability to hydrolyze glycosidic linkages in oligopentoses and polypentoses.

[0097] The term “arabinolytic activity” is intended to include the ability to hydrolyze glycosidic linkages in oligopentoses and polypentoses.

[0098] The term “cellulolytic activity” is intended to include the ability to hydrolyze glycosidic linkages in oligohexoses and polyhexoses. Cellulolytic activity may also include the ability to depolymerize or debranch cellulose and hemicellulose.

[0099] As used herein, the term “lactate dehydrogenase” or “LDH” is intended to include the enzymes capable of converting pyruvate into lactate. It is understood that LDH can also catalyze the oxidation of hydroxybutyrate. LDH includes those enzymes that correspond to Enzyme Commission Number 1.1.1.27.

[0100] As used herein the term “alcohol dehydrogenase” or “ADH” is intended to include the enzymes capable of converting acetaldehyde into an alcohol, such as ethanol. ADH also includes the enzymes capable of converting acetone to isopropanol. ADH includes those enzymes that correspond to Enzyme Commission Number 1.1.1.1.

[0101] As used herein, the term “phosphotransacetylase” or “PTA” is intended to include the enzymes capable of converting acetyl-phosphate into acetyl-CoA. PTA includes those enzymes that correspond to Enzyme Commission Number 2.3.1.8.

[0102] As used herein, the term “acetate kinase” or “ACK” is intended to include the enzymes capable of converting acetate into acetyl-phosphate. ACK includes those enzymes that correspond to Enzyme Commission Number 2.7.2.1.

[0103] As used herein, the term “pyruvate formate lyase” or “PFL” is intended to include the enzymes capable of converting pyruvate into acetyl-CoA and formate. PFL includes those enzymes that correspond to Enzyme Commission Number 2.3.1.54.

[0104] As used herein, the term “formate dehydrogenase” or “FDH” is intended to include the enzymes capable of converting formate and NAD⁺ to NADH and CO₂. FDH includes those enzymes that correspond to Enzyme Commission Number 1.2.1.2.

[0105] As used herein, the term “acetaldehyde dehydrogenase” or “ACDH” is intended to include the enzymes capable of converting acetyl-CoA to acetaldehyde. ACDH includes those enzymes that correspond to Enzyme Commission Number 1.2.1.3.

[0106] As used herein, the term “acetaldehyde/alcohol dehydrogenase” is intended to include the enzymes capable of converting acetyl-CoA to ethanol. Acetaldehyde/alcohol dehydrogenase includes those enzymes that correspond to Enzyme Commission Numbers 1.2.1.10 and 1.1.1.1.

[0107] As used herein, the term “glycerol-3-phosphate dehydrogenase” or “GPD” is intended to include the enzymes capable of converting dihydroxyacetone phosphate to glycerol-3-phosphate. GPD includes those enzymes that correspond to Enzyme Commission Number 1.1.1.8, including GPD1 and GPD2. Eukaryotic GPD sequences include: S. cerevisiae gpd1 (SEQ ID NOs: 206 and 207) and S. cerevisiae gpd2 (SEQ ID NOs: 204 and 205).

[0108] As used herein, the term “glycerol 3-phosphatase” or “GPP” is intended to include the enzymes capable of converting glycerol 3-phosphate to glycerol. GPP includes those enzymes that correspond to Enzyme Commission Number 3.1.3.21, including GPP1 and GPP2.

[0109] As used herein, the term “acetyl-CoA synthetase” or “ACS” is intended to include the enzymes capable of converting acetate to acetyl-CoA. Acetyl-CoA synthetase includes those enzymes that correspond to Enzyme Commission Number 6.2.1.1. In some embodiments, ACS is from S. cerevisiae.

[0110] S. cerevisiae ACS1 nucleotide and amino acid sequences correspond to SEQ ID NO: 1 and SEQ ID NO: 2, respectively. S. cerevisiae ACS2 nucleotide and amino acid sequences correspond to SEQ ID NO: 3 and SEQ ID NO: 4, respectively. In some embodiments, ACS is from Zygosaccharomyces bailii.

[0111] Zygosaccharomyces bailii ACS nucleotide and amino acid sequences correspond to SEQ ID NO: 5 and SEQ ID NO: 6, respectively. In some embodiments, ACS is from Salmonella enterica. Salmonella enterica ACS nucleotide and amino acid sequences correspond to SEQ ID NO: 7 and SEQ ID NO: 8, respectively.

[0112] As used herein, the term “thiolase” is intended to include the enzymes capable of converting acetyl-CoA to acetoacetyl-CoA. Thiolase includes those enzymes that correspond to Enzyme Commission Number 2.3.1.9.

[0113] As used herein, the term “CoA transferase” is intended to include the enzymes capable of converting acetate and acetoacetyl-CoA to acetoacetate and acetyl-CoA. CoA transferase includes those enzymes that correspond to Enzyme Commission Number 2.8.3.8.

[0114] As used herein, the term “acetoacetate decarboxylase” is intended to include the enzymes capable of converting acetoacetate to acetone and carbon dioxide. Acetoacetate decarboxylase includes those enzymes that correspond to Enzyme Commission Number 4.1.1.4.

[0115] As used herein, the term “alcohol acetyltransferase” is intended to include the enzymes capable of converting acetyl-CoA and ethanol to ethyl acetate. Alcohol acetyltransferase includes those enzymes that correspond to Enzyme Commission Number 2.3.1.84.

[0116] The term “pyruvate decarboxylase activity” is intended to include the ability of a polypeptide to enzymatically convert pyruvate into acetaldehyde and carbon dioxide (e.g., “pyruvate decarboxylase” or “PDC”). Typically, the activity of a selected polypeptide encompasses the total enzymatic activity associated with the produced polypeptide, comprising, e.g., the superior substrate affinity of the enzyme, thermostability, stability at different pHs, or a combination of these attributes. PDC includes those enzymes that correspond to Enzyme Commission Number 4.1.1.1.

[0117] As used herein, the term “sugar transporter-like protein,” “STL1” or “Stl1p” is intended to include glycerol proton symporter proteins capable of transporting glycerol across a plasma membrane. Included within the scope of this term are the S. cerevisiae glycerol active transporter, as well as those from other yeast such as C. albicans, Saccharomyces paradoxus, and Pichia sorbitophila.

[0118] As used herein, the term “arabinose isomerase” is intended to include the enzymes capable of converting L-arabinose to L-ribulose. Arabinose isomerase includes those enzymes that correspond to Enzyme Commission Number 5.3.1.4. In some embodiments, arabinose isomerase is from B. thetaiotaomicron. B. thetaiotaomicron arabinose isomerase nucleotide and amino acid sequences correspond to SEQ ID NO: 133 and SEQ ID NO: 134, respectively.

[0119] As used herein, the term “ribulokinase” is intended to include the enzymes capable of converting L- or D-ribulose to L- or D-ribulose 5-phosphate. Ribulokinase includes those enzymes that correspond to Enzyme Commission Number 2.7.1.16. In some embodiments, ribulokinase is araB from B. thetaiotaomicron. B. thetaiotaomicron araB nucleotide and amino acid sequences correspond to SEQ ID NO: 135 and SEQ ID NO: 136, respectively.

[0120] As used herein, the term “ribulose-5-phosphate epimerase” or “D-ribulose-5-phosphate 3-epimerase” is intended to include the enzymes capable of converting D-ribulose 5-phosphate to D-xylulose 5-phosphate. Ribulose-5-phosphate epimerase or D-ribulose-5-phosphate 3-epimerase include those enzymes that correspond to Enzyme Commission Number 5.1.3.1.

[0121] In some embodiments, ribulose-5-phosphate epimerase is from B. thetaiotaomicron. B. thetaiotaomicron ribulose-5-phosphate epimerase nucleotide and amino acid sequences correspond to SEQ ID NO: 137 and SEQ ID NO: 138, respectively.

[0122] As used herein, the term “xylose isomerase” or “XI” is meant to refer to an enzyme that catalyzes the chemical reaction: D-xylose⇄D-xylulose. This enzyme belongs to the family of isomerases, specifically those intramolecular oxidoreductases interconverting aldoses and ketoses. The systematic name of this enzyme class is D-xylose aldose-ketose-isomerase. Other names in common use include D-xylose isomerase, D-xylose ketoisomerase, and D-xylose ketol-isomerase. This enzyme participates in pentose and glucuronate interconversions and fructose and mannose metabolism. The enzyme is used industrially to convert glucose to fructose in the manufacture of high-fructose corn syrup. It is sometimes referred to as “glucose isomerase”. XI includes those enzymes that correspond to Enzyme Commission Number 5.3.1.5.

[0123] As used herein, the term “phosphoketolase”, “single-specificity phosphoketolase” or “dual-specificity phosphoketolase” is intended to include the enzymes that catalyze the conversion of D-xylulose 5-phosphate to D-glyceraldehyde 3-phosphate. Dual specificity phosphoketolase additionally includes the enzymes that catalyze the conversion of D-fructose 6-phosphate to D-erythrose 4-phosphate. Phosphoketolase, single-specificity phosphoketolase and dual-specificity phosphoketolase are referred to collectively as “PHKs” or “phosphoketolase” (FIG. 7). PHKs include those enzymes that correspond to Enzyme Commission Number (EC) 4.1.2.9 and 4.1.2.22. In some embodiments, PHK is from A. niger (SEQ ID NOs: 143 and 144), N. crassa (SEQ ID NOs: 145 and 146), L. casei PHK (SEQ ID NOs: 147 and 148), L. plantarum PHK1 (SEQ ID NOs: 149 and 150), L. plantarum PHK2 (SEQ ID NOs: 151 and 152), B. adolescentis (SEQ ID NOs: 153 and 154), B. bifidum (SEQ ID NOs: 155 and 156), B. gallicum (SEQ ID NOs: 157 and 158), B. animalis (SEQ ID NOs: 159 and 160), L. pentosum (SEQ ID NOs: 161 and 162), L. acidophilus (SEQ ID NOs: 163 and 164), P. chrysogenum (SEQ ID NOs: 165 and 166), A. nidulans (SEQ ID NOs: 167 and 168), A. clavatus (SEQ ID NOs: 169 and 170), L. mesenteroides (SEQ ID NOs: 171 and 172), or O. oenii (SEQ ID NOs: 173 and 174).

[0124] As used herein, the term “phosphotransacetylase” or “PTA” is intended to include the enzymes capable of converting acetyl-phosphate into acetyl-CoA. PTA includes those enzymes that correspond to Enzyme Commission Number 2.3.1.8.

[0125] As used herein, the term “acetate kinase” or “ACK” is intended to include the enzymes capable of converting acetate into acetyl-phosphate or acetyl-P. ACK includes those enzymes that correspond to Enzyme Commission Number 2.7.2.1.

[0126] The term “ethanologenic” is intended to include the ability of a microorganism to produce ethanol from a carbohydrate as a fermentation product. The term is intended to include, but is not limited to, naturally occurring ethanologenic organisms, ethanologenic organisms with naturally occurring or induced mutations, and ethanologenic organisms which have been genetically modified.

[0127] The terms “fermenting” and “fermentation” are intended to include the enzymatic process (e.g., cellular or acellular, e.g., a lysate or purified polypeptide mixture) by which ethanol is produced from a carbohydrate, in particular, as a product of fermentation.

[0128] The term “secreted” is intended to include the movement of polypeptides to the periplasmic space or extracellular milieu. The term “increased secretion” is intended to include situations in which a given polypeptide is secreted at an increased level (i.e., in excess of the naturally-occurring amount of secretion). In certain embodiments, the term “increased secretion” refers to an increase in secretion of a given polypeptide that is at least about 10% or at least about 100%, 200%, 300%, 400%, 500%, 600%, 700%, 800%, 900%, 1000%, or more, as compared to the naturally-occurring level of secretion.

[0129] The term “secretory polypeptide” is intended to include any polypeptide(s), alone or in combination with other polypeptides, that facilitate the transport of another polypeptide from the intracellular space of a cell to the extracellular milieu. In certain embodiments, the secretory polypeptide(s) encompass all the necessary secretory polypeptides sufficient to impart secretory activity to a Gram-negative or Gram-positive host cell or to a yeast host cell. Typically, secretory proteins are encoded in a single region or locus that may be isolated from one host cell and transferred to another host cell using genetic engineering. In certain embodiments, the secretory polypeptide(s) are derived from any bacterial cell having secretory activity or any yeast cell having secretory activity. In certain embodiments, the secretory polypeptide(s) are derived from a host cell having Type II secretory activity. In certain embodiments, the host cell is a thermophilic bacterial cell. In certain embodiments, the host cell is a yeast cell.

[0130] The term “derived from” is intended to include the isolation (in whole or in part) of a polynucleotide segment from an indicated source or the purification of a polypeptide from an indicated source. The term is intended to include, for example, direct cloning, PCR amplification, or artificial synthesis from or based on a sequence associated with the indicated polynucleotide source.

[0131] The term “recombinant microorganism” or “recombinant host cell” is intended to include progeny or derivatives of the recombinant microorganisms of the invention. Because certain modifications may occur in succeeding generations due to either mutation or environmental influences, such progeny or derivatives may not, in fact, be identical to the parent cell, but are still included within the scope of the term as used herein.

[0132] By “thermophilic” is meant an organism that thrives at a temperature of about 45° C. or higher.

[0133] By “mesophilic” is meant an organism that thrives at a temperature of about 20-45° C.

[0134] The term “organic acid” is art-recognized. “Organic acid,” as used herein, also includes certain organic solvents such as ethanol. The term “lactic acid” refers to the organic acid 2-hydroxypropionic acid in either the free acid or salt form. The salt form of lactic acid is referred to as “lactate” regardless of the neutralizing agent, i.e., calcium carbonate or ammonium hydroxide. The term “acetic acid” refers to the organic acid methanecarboxylic acid, also known as ethanoic acid, in either free acid or salt form. The salt form of acetic acid is referred to as “acetate.”

[0135] Certain embodiments of the present invention provide for the “insertion,” (e.g., the addition, integration, incorporation, or introduction) of certain genes or particular polynucleotide sequences within thermophilic or mesophilic microorganisms, which insertion of genes or particular polynucleotide sequences may be understood to encompass “genetic modification(s)” or “transformation(s)” such that the resulting strains of said thermophilic or mesophilic microorganisms may be understood to be “genetically modified” or “transformed.” In certain embodiments, strains may be of bacterial, fungal, or yeast origin.

[0136] Certain embodiments of the present invention provide for the “inactivation” or “deletion” of certain genes or particular polynucleotide sequences within thermophilic or mesophilic microorganisms, which “inactivation” or “deletion” of genes or particular polynucleotide sequences may be understood to encompass “genetic modification(s)” or “transformation(s)” such that the resulting strains of said thermophilic or mesophilic microorganisms may be understood to be “genetically modified” or “transformed.” In certain embodiments, strains may be of bacterial, fungal, or yeast origin.

[0137] The term “consolidated bioprocessing” or “CBP” refers to biomass processing schemes involving enzymatic or microbial hydrolysis that commonly involve four biologically mediated transformations: (1) the production of saccharolytic enzymes (amylases, cellulases, and hemicellulases); (2) the hydrolysis of carbohydrate components present in pretreated biomass to sugars; (3) the fermentation of hexose sugars (e.g., glucose, mannose, and galactose); and (4) the fermentation of pentose sugars (e.g., xylose and arabinose). These four transformations occur in a single step in a process configuration called CBP, which is distinguished from other less highly integrated configurations in that it does not involve a dedicated process step for cellulase and/or hemicellulase production.

[0138] The term “CBP organism” is intended to include microorganisms of the invention, e.g., microorganisms that have properties suitable for CBP.

[0139] In one aspect of the invention, the genes or particular polynucleotide sequences are inserted to activate the activity for which they encode, such as the expression of an enzyme. In certain embodiments, genes encoding enzymes in the metabolic production of ethanol, e.g., enzymes that metabolize pentose and/or hexose sugars, may be added to a mesophilic or thermophilic organism. In certain embodiments of the invention, the enzyme may confer the ability to metabolize a pentose sugar and be involved, for example, in the D-xylose pathway and/or L-arabinose pathway.

[0140] In one aspect of the invention, the genes or particular polynucleotide sequences are partially, substantially, or completely deleted, silenced, inactivated, or down-regulated in order to inactivate the activity for which they encode, such as the expression of an enzyme. Deletions provide maximum stability because there is no opportunity for a reverse mutation to restore function. Alternatively, genes can be partially, substantially, or completely deleted, silenced, inactivated, or down-regulated by insertion of nucleic acid sequences that disrupt the function and/or expression of the gene (e.g., P1 transduction or other methods known in the art). The terms “eliminate,” “elimination,” and “knockout” are used interchangeably with the terms “deletion,” “partial deletion,” “substantial deletion,” or “complete deletion.” In certain embodiments, strains of thermophilic or mesophilic microorganisms of interest may be engineered by site directed homologous recombination to knockout the production of organic acids. In still other embodiments, RNAi or antisense DNA (asDNA) may be used to partially, substantially, or completely silence, inactivate, or down-regulate a particular gene of interest.

[0141] In certain embodiments, the genes targeted for deletion or inactivation as described herein may be endogenous to the native strain of the microorganism, and may thus be understood to be referred to as “native gene(s)” or “endogenous gene(s).” An organism is in “a native state” if it has not been genetically engineered or otherwise manipulated by the hand of man in a manner that intentionally alters the genetic and/or phenotypic constitution of the organism. For example, wild-type organisms may be considered to be in a native state. In other embodiments, the gene(s) targeted for deletion or inactivation may be non-native to the organism.

[0142] Similarly, the enzymes of the invention as described herein can be endogenous to the native strain of the microorganism, and can thus be understood to be referred to as “native” or “endogenous.”

[0143] The term “upregulated” means increased in activity, e.g., increase in enzymatic activity of the enzyme as compared to activity in a native host organism.

[0144] The term “downregulated” means decreased in activity, e.g., decrease in enzymatic activity of the enzyme as compared to activity in a native host organism.

[0145] The term “activated” means expressed or metabolically functional.

[0146] The term “adapted for growing” means selection of an organism for growth under conditions in which the organism does not otherwise grow or in which the organism grows slowly or minimally. Thus, an organism that is said to be adapted for growing under the selected condition, grows better than an organism that has not been adapted for growing under the selected conditions. Growth can be measured by any methods known in the art, including, but not limited to, measurement of optical density or specific growth rate.

[0147] The term “carbohydrate source” is intended to include any source of carbohydrate including, but not limited to, biomass or carbohydrates, such as a sugar or a sugar alcohol. “Carbohydrates” include, but are not limited to, monosaccharides (e.g., glucose, fructose, galactose, xylose, arabinose, or ribose), sugar derivatives (e.g., sorbitol, glycerol, galacturonic acid, rhamnose, xylitol), disaccharides (e.g., sucrose, cellobiose, maltose, or lactose), oligosaccharides (e.g., xylooligomers, cellodextrins, or maltodextrins), and polysaccharides (e.g., xylan, cellulose, starch, mannan, alginate, or pectin).

[0148] As used herein, an “amylolytic enzyme” can be any enzyme involved in amylase digestion, metabolism and/or hydrolysis. The term “amylase” refers to an enzyme that breaks starch down into sugar. Amylase is present in human saliva, where it begins the chemical process of digestion. Foods that contain much starch but little sugar, such as rice and potato, taste slightly sweet as they are chewed because amylase turns some of their starch into sugar in the mouth. The pancreas also makes amylase (α-amylase) to hydrolyse dietary starch into disaccharides and trisaccharides which are converted by other enzymes to glucose to supply the body with energy. Plants and some bacteria also produce amylase. All amylases are glycoside hydrolases and act on α-1,4-glycosidic bonds. Some amylases, such as γ-amylase (glucoamylase), also act on α-1,6-glycosidic bonds. Amylase enzymes include α-amylase (EC 3.2.1.1), β-amylase (EC 3.2.1.2), and γ-amylase (EC 3.2.1.3). The α-amylases are calcium metalloenzymes, unable to function in the absence of calcium. By acting at random locations along the starch chain, α-amylase breaks down long-chain carbohydrates, ultimately yielding maltotriose and maltose from amylose, or maltose, glucose and “limit dextrin” from amylopectin. Because it can act anywhere on the substrate, α-amylase tends to be faster-acting than β-amylase. In animals, it is a major digestive enzyme and its optimum pH is about 6.7-7.0. Another form of amylase, β-amylase is also synthesized by bacteria, fungi, and plants. Working from the non-reducing end, β-amylase catalyzes the hydrolysis of the second α-1,4 glycosidic bond, cleaving off two glucose units (maltose) at a time. Many microbes produce amylase to degrade extracellular starches. In addition to cleaving the last α(1-4)glycosidic linkages at the nonreducing end of amylose and amylopectin, yielding glucose, γ-amylase will cleave α(1-6) glycosidic linkages. Another amylolytic enzyme is alpha-glucosidase that acts on maltose and other short malto-oligosaccharides produced by alpha-, beta-, and gamma-amylases, converting them to glucose. Another amylolytic enzyme is pullulanase. Pullulanase is a specific kind of glucanase, an amylolytic exoenzyme, that degrades pullulan. Pullulan is regarded as a chain of maltotriose units linked by alpha-1,6-glycosidic bonds. Pullulanase (EC 3.2.1.41) is also known as pullulan-6-glucanohydrolase (Debranching enzyme). Another amylolytic enzyme, isopullulanase, hydrolyses pullulan to isopanose (6-alpha-maltosylglucose). Isopullulanase (EC 3.2.1.57) is also known as pullulan 4-glucanohydrolase. An “amylase” can be any enzyme involved in amylase digestion, metabolism and/or hydrolysis, including α-amylase, β-amylase, glucoamylase, pullulanase, isopullulanase, and alpha-glucosidase.

[0149] As used herein, a “saccharolytic enzyme” can be any enzyme involved in carbohydrate digestion, metabolism and/or hydrolysis, including amylases, cellulases, hemicellulases, cellulolytic and amylolytic accessory enzymes, inulinases, levanases, and pentose sugar utilizing enzymes. In certain embodiments, the saccharolytic enzyme is a hemicellulase. Various hemicellulases can be used in the present invention, including but not limited to those described in co-owned International Application No. PCT/US2014/026499 filed Mar. 13, 2014, which is incorporated by reference in its entirety herein. Additional non-limiting hemicellulase examples include hemicellulases obtained from a microorganism selected from the group consisting of Neosartorya fischeri, Pyrenophora tritici-repentis, Aspergillus niger, Aspergillus fumigatus, Aspergillus oryzae, Trichoderma reesei, and Aspergillus Aculeatus. Table 1 lists exemplary hemicellulases that can be engineered, as indicated, in the recombinant microorganisms of the invention. The plasmids and strains presented in Table 1 are disclosed in co-owned International Application Publication Nos. WO 2014/035458, which is herein incorporated by reference in its entirety.

TABLE 1

| Fungal | | | | | | | | |
|---|---|---|---|---|---|---|---|---|
| Cellulase | Enzyme | | | | GenBank | | | SEQ ID NO: |
| (FC)# | type* | Modification | Activity | Organism | Accession # | Strain # | Plasmid # | (DNA/Protein) |
| 7 | CE1 | Overexpression | acetylxylanesterase | Neosartorya | XP_001262186 | M1514 | pMU1934 | 175/176 |
| | | | | fischeri | | | | |
| 36 | GH43 | Overexpression | beta-xylosidase, | Pyrenophora | XP_001940956 | M1834 | pMU2173 | 177/178 |
| | | | HIS tagged | tritici-repentis | | | | |
| 138 | GH10 | Overexpression | Endo-xylanase | Aspergillus | CAA03655.1 | M3441 | pMU2816 | 179/180 |
| | | | | niger | | | | |
| 136 | CE16 | Overexpression | Acetyl esterase | Aspergillus | XP_749200 | M3325 | pMU3138 | 181/182 |
| | | | | fumigatus | | | | |
| 106 | GH115 | Overexpression | α-glucuronidase | Aspergillus | BAE56806 | M3511 | pMU3220 | 183/184 |
| | | | | oryzae | | | | |
| 110 | GH115 | Overexpression | α-glucuronidase | Aspergillus | XP_749042 | M3449 | pMU3161 | 185/186 |
| | | | | fumigatus | | | | |
| 140 | GH3 | Overexpression | β-glucosidase | Saccharomyco | P22506 | | pMU2301 | 187/188 |
| | | | | psis fibuligera | | | | |
| 139 | GH31 | Overexpression | α-galactosidase | Trichoderma | Z69253 | M2665 | pMU2981 | 189/190 |
| | | | | reesei | | | | |
| 142 | GH5/GH2 | Overexpression | β-mannase | Trichoderma | L25310 | M2351 | pMU2659 | 191/192 |
| | | | | reesei | | | | |
| 124 | GH5/GH2 | Overexpression | endo-β-mannanase/ | Neosartorya | XP_001262744 | M3318 | pMU3131 | 193/194 |
| | | | mannosidase | fischeri | | | | |
| 72 | GH7B | Overexpression | Endoglucanase | Aspergillus | XP_747897 | M1311 | pMU1626 | 195/196 |
| | | | (EG1) | fumigatus | | | | |
| 148 | GH3 | Overexpression | beta-glucosidase, | Aspergillus | P48825 | | pMU3559 | 197/198 |
| | | | HIS tagged | Aculeatus | | | | |

*“Enzyme type” is descriptive in the field for the type of enzyme, and each enzyme is further defined in the “activity” column.

[0150] The terms “industrial corn mash,” “solids corn mash,” and “corn mash” are used interchangeably and are intended to include liquefied corn obtained from a commercial facility.

### Biomass

[0151] Biomass can include any type of biomass known in the art or described herein. For example, biomass can include, but is not limited to, starch, sugar, and lignocellulosic materials. Starch materials can include, but are not limited to, mashes such as corn, wheat, rye, barley, rice, or milo. Sugar materials can include, but are not limited to, sugar beets, artichoke tubers, sweet sorghum, or cane. The terms “lignocellulosic material,” “lignocellulosic substrate,” and “cellulosic biomass” mean any type of biomass comprising cellulose, hemicellulose, lignin, or combinations thereof, such as but not limited to woody biomass, forage grasses, herbaceous energy crops, non-woody-plant biomass, agricultural wastes and/or agricultural residues, forestry residues and/or forestry wastes, paper-production sludge and/or waste paper sludge, waste-water-treatment sludge, municipal solid waste, corn fiber from wet and dry mill corn ethanol plants, and sugar-processing residues. The terms “hemicellulosics,” “hemicellulosic portions,” and “hemicellulosic fractions” mean the non-lignin, non-cellulose elements of lignocellulosic material, such as but not limited to hemicellulose (i.e., comprising xyloglucan, xylan, glucuronoxylan, arabinoxylan, mannan, glucomannan, and galactoglucomannan, inter alia), pectins (e.g., homogalacturonans, rhamnogalacturonan I and II, and xylogalacturonan), and proteoglycans (e.g., arabinogalactan-protein, extensin, and proline-rich proteins).

[0152] In a non-limiting example, the lignocellulosic material can include, but is not limited to, woody biomass, such as recycled wood pulp fiber, sawdust, hardwood, softwood, and combinations thereof; grasses, such as switch grass, cord grass, rye grass, reed canary grass, miscanthus, or a combination thereof; sugar-processing residues, such as but not limited to sugar cane bagasse; agricultural wastes, such as but not limited to rice straw, rice hulls, barley straw, corn cobs, cereal straw, wheat straw, canola straw, oat straw, oat hulls, and corn fiber; stover, such as but not limited to soybean stover, corn stover; succulents, such as but not limited to, Agave; and forestry wastes, such as but not limited to, recycled wood pulp fiber, sawdust, hardwood (e.g., poplar, oak, maple, birch, willow), softwood, or any combination thereof. Lignocellulosic material may comprise one species of fiber; alternatively, lignocellulosic material may comprise a mixture of fibers that originate from different lignocellulosic materials. Other lignocellulosic materials are agricultural wastes, such as cereal straws, including wheat straw, barley straw, canola straw and oat straw; corn fiber; stovers, such as corn stover and soybean stover; grasses, such as switch grass, reed canary grass, cord grass, and miscanthus; or combinations thereof.

[0153] Paper sludge is also a viable feedstock for lactate or acetate production. Paper sludge is solid residue arising from pulping and paper-making, and is typically removed from process wastewater in a primary clarifier. At a disposal cost of $30/wet ton, the cost of sludge disposal equates to $5/ton of paper that is produced for sale. The cost of disposing of wet sludge is a significant incentive to convert the material for other uses, such as conversion to ethanol. Processes provided by the present invention are widely applicable. Moreover, the saccharification and/or fermentation products may be used to produce ethanol or higher value added chemicals, such as organic acids, aromatics, esters, acetone and polymer intermediates.

### Glycerol Reduction

[0154] Anaerobic growth conditions require the production of endogenous electron acceptors, such as the coenzyme nicotinamide adenine dinucleotide (NAD⁺). In cellular redox reactions, the NAD⁺/NADH couple plays a vital role as a reservoir and carrier of reducing equivalents. Ansell, R., et al., EMBO J. 16:2179-87 (1997). Cellular glycerol production, which generates an NAD⁺, serves as a redox valve to remove excess reducing power during anaerobic fermentation in yeast. In addition to functioning as an electron sink, yeast require intracellular glycerol as a compatible solute to balance high extracellular osmolarity.

[0155] Glycerol production is, however, an energetically wasteful process that expends ATP and results in the loss of a reduced three-carbon compound. Ansell, R., et al., EMBO J. 16:2179-87 (1997). Furthermore, a considerable amount of the glycerol produced by the organism is excreted from the cell where it offers no advantage to the organism. To generate glycerol from a starting glucose molecule, glycerol 3-phosphate dehydrogenase (GPD) reduces dihydroxyacetone phosphate to glycerol 3-phosphate and glycerol 3-phosphatase (GPP) dephosphorylates glycerol 3-phosphate to glycerol. Despite being energetically wasteful, glycerol production is a necessary metabolic process for anaerobic growth as deleting GPD activity completely inhibits growth under anaerobic conditions. See Ansell, R., et al., EMBO J. 6:2179-87 (1997).

[0156] GPD is encoded by two isogenes, gpd1 and gpd2. GPD1 encodes the major isoform in anaerobically growing cells, while GPD2 is required for glycerol production in the absence of oxygen, which stimulates its expression. Pahlman, A-K., et al., J. Biol. Chem. 276:3555-63 (2001). The first step in the conversion of dihydroxyacetone phosphate to glycerol by GPD is rate controlling. Guo, Z. P., et al., Metab. Eng. 13:49-59 (2011). GPP is also encoded by two isogenes, gpp1 and gpp2. The deletion of GPP genes arrests growth when shifted to anaerobic conditions, demonstrating that GPP is important for cellular tolerance to osmotic and anaerobic stress. See Pahlman, A-K., et al., J. Biol. Chem. 276:3555-63 (2001).

[0157] In certain embodiments, one or more genes involved in dihydroxyacetone metabolism are upregulated or over expressed by the recombinant microorganism. In some embodiments the recombinant microorganism overexpresses a dihydroxyacetone kinase, such as DAK1.

[0158] Because glycerol is a major by-product of anaerobic production of ethanol, many efforts have been made to delete cellular production of glycerol. However, because of the reducing equivalents produced by glycerol synthesis, deletion of the glycerol synthesis pathway cannot be done without compensating for this valuable metabolic function. Attempts to delete glycerol production and engineer alternate electron acceptors have been made. Liden, G., et al., Appl. Env. Microbiol. 62:3894-96 (1996); Medina, V. G., et al., Appl. Env. Microbiol. 76:190-195 (2010). Liden and Medina both deleted the gpd1 and gpd2 genes and attempted to bypass glycerol formation using additional carbon sources. Liden engineered a xylose reductase from Pichia stipitis into an S. cerevisiae gpd1/2 deletion strain. The xylose reductase activity facilitated the anaerobic growth of the glycerol-deleted strain in the presence of xylose. See Liden, G., et al., Appl. Env. Microbiol. 62:3894-96 (1996). Medina engineered an acetylaldehyde dehydrogenase, mhpF, from E. coli into an S. cerevisiae gpd1/2 deletion strain to convert acetyl-CoA to acetaldehyde. The acetylaldehyde dehydrogenase activity facilitated the anaerobic growth of the glycerol-deletion strain in the presence of acetic acid but not in the presence of glucose as the sole source of carbon. Medina, V. G., et al., Appl. Env. Microbiol. 76:190-195 (2010); see also EP 2277989. Medina noted several issues with the mhpF-containing strain that needed to be addressed before implementing industrially, including significantly reduced growth and product formation rates than yeast comprising GPD1 and GPD2.

[0159] Additional attempts to redirect flux from glycerol to ethanol have included the engineering of a non-phosphorylating NADP+-dependent glyceraldehydes-3-phosphate dehydrogenase (GAPN) into yeast, either with or without the simultaneous knockout of GPD1. Bro, C., et al., Metab. Eng. 8:102-111 (2006); U.S. Patent Appl. Pub. No. US2006/0257983; Guo, Z. P., et al., Metab. Eng. 13:49-59 (2011). However, other cellular mechanisms exist to control the production and accumulation of glycerol, including glycerol exporters such as FPS1 and the glycerol/Et symporter STL1, that may not require the engineering of alternate NADP+/NADPH coupling or deletion of glycerol synthesis genes. Tamás, M. J., et al., Mol. Microbiol. 31:1087-1004 (1999) and Ferreira, C., et al. (2005).

[0160] STL1 is a protein with 12 putative transmembrane domains that functions at the cell membrane as a glycerol/H⁺ symporter. Yeast cells lacking STL1 are unable to actively uptake glycerol and heterologous expression of S. cerevisiae STL1 in S. pombe results in glycerol uptake via an active mechanism. Ferreira, C., et al. (2005). In addition, glycerol uptake via STL1 has been shown to be repressed by the presence of glucose through transcriptional repression of the stl1 gene. Conversely, glycerol uptake can be induced by growth on nonfermentable carbon sources and the expression of stl1 is induced under gluconeogenic conditions and by osmotic shock during exponential growth on glucose-based media. Tulha, J., et al. (2010) and Ferreira, C., et al. (2005).

[0161] In particular embodiments of the invention that modulate STL1, the recombinant host cells are genetically modified to take up glycerol in the presence of glucose, something which cells cannot normally do. The derepression of glycerol uptake in the presence of glucose results in a three step process. First, glycerol is produced by the organism in response to osmotic or redox stress. Second, glycerol is secreted into the fermentation medium. Finally, glycerol is transported back up into the cell through the action of an active glycerol transporter, for example STL1. The net effect is creation of a futile cycle where glycerol is first excreted and then taken back up (FIG. 1). Without wishing to be bound by any one theory, it is also possible that higher intracellular glycerol levels may function to reduce endogenous glycerol production through feedback inhibition of the native glycerol production machinery. Another embodiment of the invention comprises uptake of glycerol that is exogenously available in the substrate or fermentation medium.

[0162] An example STL1 sequence from S. cerevisiae is provided in SEQ ID NO: 139 and SEQ ID NO: 140. In some embodiments, STL1 is from C. albicans. C. albicans STL1 nucleotide and amino acid sequences correspond to SEQ ID NO: 141 and SEQ ID NO: 142, respectively. In some embodiments, STL1 is from Pichia sorbitophila. P. sorbitophila STL1 nucleotide and amino acid sequences correspond to SEQ ID NO: 9 and SEQ ID NO: 10, respectively. In certain embodiments, STL1 is from Saccharomyces paradoxus. S. paradoxus STL1 nucleotide and amino acid sequences correspond to SEQ ID NO: 224 and SEQ ID NO: 225, respectively.

[0163] An additional protein that may be involved in glycerol regulation is encoded by the S. cerevisiae gene GUP1. Although the role of GUP1 in glycerol regulation is unclear, overexpression of GUP1 in S. cerevisiae has been shown to result in increased ethanol production. See Yu, K. O., et al., “Engineering of glycerol utilization pathway for ethanol production by Saccharomyces cerevisiae,” Bioresour. Technol. 101(11):157-61 (2010) and International Publication No. WO 2011/149353, which are incorporated by reference herein in their entireties.

[0164] S. cerevisiae GUP1 nucleotide and amino acid sequences correspond to SEQ ID NO: 11 and SEQ ID NO: 12, respectively. In some embodiments of the invention, STL1 and GUP1 are modulated in the same recombinant microorganism. In certain embodiments of the invention, STL1 and GUP1 are overexpressed in the same recombinant microorganism.

[0165] FPS1 is a channel protein located in the plasma membrane that controls the accumulation and release of glycerol in yeast osmoregulation. Null mutants of this strain accumulate large amounts of intracellular glycerol, grow much slower than wild-type, and consume the sugar substrate at a slower rate. Tamás, M. J., et al., Mol. Microbiol. 31:1087-1004 (1999). Despite slower growth under anaerobic conditions, an fps1Δ strain can serve as an alternative to eliminating NAD⁺-dependent glycerol activity. An fps1Δ strain has reduced glycerol formation yet has a completely functional NAD⁺-dependent glycerol synthesis pathway. Alternatively, rather than deleting endogenous FPS1, constitutively active mutants of FPS1 (fps1-1) or homologs from other organisms can be used to regulate glycerol synthesis while keeping the NAD⁺-dependent glycerol activity intact. In embodiments of the invention that modulate STL1 and FPS1, the recombinant host cells can still synthesize and retain glycerol and achieve improved robustness relative to strains that are unable to make or eliminate glycerol.

[0166] An example FPS1 sequence from S. cerevisiae is provided in SEQ ID NO: 13 and SEQ ID NO: 14. Sequence for a constitutively active FPS1 from S. cerevisiae is provided in SEQ ID NO:15 and SEQ ID NO:16.

[0167] Table 2 provides exemplary genes involved in glycerol reduction that can be engineered as indicated in the recombinant microorganisms of the invention:

TABLE 2

| | | | | SEQ ID NO |
|---|---|---|---|---|
| Gene Name | Modification | Systematic name | Gene Source | (DNA/Protein) |
| FDH1 | Deletion | YOR388C | S. cerevisiae PE-2 | 199/200 |
| FDH2 | Deletion | YPL275W/ | S. cerevisiae S288C | 201/202, 203 |
| | | YPL276W | | |
| GPD2 | Deletion | YOL059W | S. cerevisiae PE-2 | 204/205 |
| GPD1 | Deletion | YDL022W | S. cerevisiae PE-2 | 206/207 |
| FCY1 | Deletion/ | YPR062W | S. cerevisiae PE-2 | 208/209 |
| | Integration site | | | |
| YLR296W | Deletion/ | YLR296W | S. cerevisiae PE-2 | 210/211 |
| | Integration site | | | |
| STL1 | Overexpression | YDR536W | S. cerevisiae | 212/213 |
| | | | M2390 | |
| GCY1 | Overexpression | YOR120W | S. cerevisiae | 214/215 |
| | | | M2390 | |
| DAK1 | Overexpression | YML070W | S. cerevisiae | 216/217 |
| | | | M2390 | |
| AdhE | Overexpression | NA | Bifidobacterium | 218/219 |
| | | | adolescentis (codon | |
| | | | optimized) | |
| PflA | Overexpression | NA | Bifidobacterium | 220/221 |
| | | | adolescentis (codon | |
| | | | optimized) | |
| PflB | Overexpression | NA | Bifidobacterium | 222/223 |
| | | | adolescentis (codon | |
| | | | optimized) | |

### Pyruvate Formate Lyase (PFL)

[0168] The conversion of the pyruvate to acetyl-CoA and formate is performed by pyruvate formate lyase (PFL). In E. coli, PFL is the primary enzyme responsible for the production of formate. PFL is a dimer of PflB that requires the activating enzyme PflAE, which is encoded by pflA, radical S-adenosylmethionine, and a single electron donor. See Waks, Z., and Silver, P. A., Appl. Env. Microbiol. 75:1867-1875 (2009). Waks and Silver engineered strains of S. cerevisiae to secrete formate by the addition of PFL and AdhE from E. coli and deletion of endogenous formate dehydrogenases and to produce hydrogen in a two-step process using E. coli. Waks and Silver, however, did not combine formate production with the removal of glycerol formation, and the use of formate as an alternate electron acceptor for the reduction of glycerol was not proposed or evaluated.

[0169] PFL enzymes for use in the recombinant host cells of the invention can come from a bacterial or eukaryotic source. Examples of bacterial PFL include, but are not limited to, Bacillus licheniformis DSM13, Bacillus licheniformis ATCC14580, Streptococcus thermophilus CNRZ1066, Streptococcus thermophilus LMG18311, Streptococcus thermophilus LMD-9, Lactobacillus plantarum WCFS1 (Gene Accession No. lp_2598), Lactobacillus plantarum WCFS1 (Gene Accession No. lp_3313), Lactobacillus plantarum JDM1 (Gene Accession No. JDM1_2695), Lactobacillus plantarum JDM1 (Gene Accession No. JDM1_2087), Lactobacillus casei b123, Lactobacillus casei ATCC 334, Bifidobacterium adolescentis, Bifidobacterium longum NCC2705, Bifidobacterium longum DJO10A, Bifidobacterium animalis DSM 10140, Clostridium cellulolyticum, or Escherichia coli. Additional PFL enzymes may be from the PFL1 family, the RNR pfl superfamily, or the PFL2 superfamily.

[0170] pflA sequences from bacteria include: Bacillus licheniformis DSM13 (SEQ ID NOs:17 and 18); Bacillus licheniformis ATCC14580 (SEQ ID NOs:19 and 20);

[0171] Streptococcus thermophilus CNRZ1066 (SEQ ID NOs:21 and 22); Streptococcus thermophilus LMG18311 (SEQ ID NOs:23 and 24); Streptococcus thermophilus LMD-9 (SEQ ID NOs:25 and 26); Lactobacillus plantarum WCFS1 (Gene Accession No: lp_2596) (SEQ ID NOs:27 and 28); Lactobacillus plantarum WCFS1 (Gene Accession No: lp_3314) (SEQ ID NOs:29 and 30); Lactobacillus plantarum JDM1 (Gene Accession No: JDM1_2660) (SEQ ID NOs:31 and 32) Lactobacillus plantarum JDM1 (Gene Accession No: JDM1_2085) (SEQ ID NOs:33 and 34); Lactobacillus casei b123 (SEQ ID NOs:35 and 36); Lactobacillus casei ATCC 334 (SEQ ID NOs:37 and 38); Bifidobacterium adolescentis (SEQ ID NOs:39 and 40); Bifidobacterium longum NCC2705 (SEQ ID NOs:41 and 42); Bifidobacterium longum DJO10A (SEQ ID NOs:43 and 44); Bifidobacterium animalis DSM 10140 (SEQ ID NOs:45 and 46); Clostridium cellulolyticum (SEQ ID NOs:47 and 48); Escherichia coli (SEQ ID NOs:49 and 50);

[0172] pflB sequences from bacteria include: Bacillus licheniformis DSM13 (SEQ ID NOs:51 and 52); Bacillus licheniformis ATCC14580 (SEQ ID NOs:53 and 54);

[0173] Streptococcus thermophilus CNRZ1066 (SEQ ID NOs:55 and 56); Streptococcus thermophilus LMG18311 (SEQ ID NOs:57 and 58); Streptococcus thermophilus LMD-9 (SEQ ID NOs:59 and 60); Lactobacillus plantarum WCFS1 (Gene Accession No. lp_2598) (SEQ ID NOs:61 and 62); Lactobacillus plantarum WCFS1 (Gene Accession No: lp_3313) (SEQ ID NOs:63 and 64); Lactobacillus plantarum JDM1 (Gene Accession No: JDM1_2695) (SEQ ID NOs:65 and 66); Lactobacillus plantarum JDM1 (Gene Accession No: JDM1_2087) (SEQ ID NOs:67 and 68); Lactobacillus casei b123 (SEQ ID NOs:69 and 70); Lactobacillus casei ATCC 334 (SEQ ID NOs:71 and 72); Bifidobacterium adolescentis (SEQ ID NOs:73 and 74); Bifidobacterium longum NCC2705 (SEQ ID NOs:75 and 76); Bifidobacterium longum DJO10A (SEQ ID NOs:77 and 78); Bifidobacterium animalis DSM 10140 (SEQ ID NOs:79 and 80); Clostridium cellulolyticum (SEQ ID NOs:81 and 82); Escherichia coli (SEQ ID NOs:83 and 84);

[0174] Examples of eukaryotic PFL include, but are not limited to, Chlamydomonas reinhardtii PflA1, Piromyces sp. E2, or Neocallimastix frontalis, Acetabularia acetabulum, Haematococcus pluvialis, Volvox carteri, Ostreococcus tauri, Ostreococcus lucimarinus, Micromonas pusilla, Micromonas sp., Porphyra haitanensis, and Cyanophora paradoxa), an opisthokont (Amoebidium parasiticum), an amoebozoan (Mastigamoeba balamuthi), a stramenopile (Thalassiosira pseudonana (2)) and a haptophyte (Prymnesium parvum), M. pusilla, Micromonas sp. O. tauri and O. lucimarinus) an amoebozoan (M. balamuthi), and a stramenopile (T. pseudonana). See Stairs, C. W., et al., “Eukaryotic pyruvate formate lyase and its activating enzyme were acquired laterally from a firmicute,” Mol. Biol. and Evol., published on-line on Feb. 3, 2011, at http://mbe.oxfordjournals.org/.

[0175] pflA sequences from eukaryotes include: Chlamydomonas reinhardtii PflA1 (SEQ ID NOs:85 and 86); Neocallimastix frontalis (SEQ ID NOs:87 and 88);

[0176] pfl1 sequences from eukaryotes include: Chlamydomonas reinhardtii PflA (SEQ ID NOs:89 and 90); Piromyces sp. E2 (SEQ ID NOs:91 and 92); Neocallimastix frontalis (nucleotide—partial CDS, missing start; SEQ ID NO:93); and Neocallimastix frontalis (amino acid—partial CDS, missing start; SEQ ID NO:94).

[0177] In certain embodiments, the recombinant microorganism comprises a deletion or disruption of one or more formate dehydrogenase genes. FDH sequences from eukaryotes include: S. cerevisiae fdh1 (SEQ ID NOs: 199 and 200) and S. cerevisiae fdh2 (SEQ ID NOs: 201 and 202). In some embodiments, the one or more pyruvate dehydrogenase genes are selected from FDH1, FDH2, or both.

### Acetaldehyde/Alcohol Dehydrogenases

[0178] Engineering of acetaldehyde dehydrogenases, alcohol dehydrogenases, and/or bifunctional acetylaldehyde/alcohol dehydrogenases into a cell can increase the production of ethanol. However, because the production of ethanol is redox neutral, an acetaldehyde/alcohol dehydrogenase activity cannot serve as an alternative for the redox balancing that the production of glycerol provides to a cell in anaerobic metabolism. When Medina attempted to express an acetylaldehyde dehydrogenase, mhpF, from E. coli in an S. cerevisiae gpd1/2 deletion strain, the strain did not grow under anaerobic conditions in the presence of glucose as the sole source of carbon. Medina, V. G., et al., Appl. Env. Microbiol. 76:190-195 (2010); see also EP 2277989. Rather, the anaerobic growth of the glycerol-deletion strain required the presence of acetic acid. However, an acetylaldehyde dehydrogenase has not been expressed in combination with PFL or with the recombinant host cells of the invention. Additionally, replacing the endogenous acetylaldehyde dehydrogenase activity with either an improved acetaldehyde dehydrogenase or using a bifunctional acetaldehyde/alcohol dehydrogenase (AADH) can positively affect the in vivo kinetics of the reaction providing for improved growth of the host strain.

[0179] AADH enzymes for use in the recombinant host cells of the invention can come from a bacterial or eukaryotic source. Examples of bacterial AADH include, but are not limited to, Clostridium phytofermentans, Escherichia coli, Bacillus coagulans, Bacillus lentus, Bacillus licheniformis, Bacillus pumilus, Bacillus subtilis, Bacteroides amylophilus, Bacteroides capillosus, Bacteroides ruminocola, Bacteroides suis, Bifidobacterium adolescentis, Bifidobacterium animalis, Bifidobacterium bifidum, Bifidobacterium infantis, Bifidobacterium longum, Bifidobacterium thermophilum, Lactobacillus acidophilus, Lactobacillus brevis, Lactobacillus buchneri (cattle only), Lactobacillus bulgaricus, Lactobacillus casei, Lactobacillus cellobiosus, Lactobacillus curvatus, Lactobacillus delbruekii, Lactobacillus farciminis (swine only), Lactobacillus fermentum, Lactobacillus helveticus, Lactobacillus lactis, Lactobacillus plantarum, Lactobacillus reuterii, Leuconostoc mesenteroides, Pediococcus acidilacticii, Pediococcus pentosaceus, Propionibacterium acidpropionici (cattle only), Propionibacterium freudenreichii, Propionibacterium shermanii, Enterococcus cremoris, Enterococcus diacetylactis, Enterococcus faecium, Enterococcus intermedius, Enterococcus lactis, or Enterococcus thermophilus

[0180] AdhE bacterial sequences include: Clostridium phytofermentans (SEQ ID NOs:95 and 96); Escherichia coli (SEQ ID NOs:97 and 98); Bifidobacterium adolescentis (amino acid; SEQ ID NO:103); Bacillus coagulans (amino acid; SEQ ID NO:104); Bacillus licheniformis (amino acid; SEQ ID NO: 105); Enterococcus faecium TX1330 (amino acid; SEQ ID NO:106);

[0181] Examples of eukaryotic AdhE include, but are not limited to, Chlamydomonas reinhardtii AdhE, Piromyces sp. E2, or Neocallimastix frontalis. AdhE sequences from eukaryotes include: Chlamydomonas reinhardtii AdhE (SEQ ID NOs: 99 and 100) and Piromyces sp. E2 (SEQ ID NOs: 101 and 102).

[0182] The recombinant microorganism of the present invention can be capable of overexpressing one or more alcohol dehydrogenases. In some embodiments, the recombinant host cell overexpresses AdhE. In one particular embodiment, the AdhE is from B. adolescentis.

### Consolidated Bioprocessing

[0183] Consolidated bioprocessing (CBP) is a processing strategy for cellulosic biomass that involves consolidating into a single process step four biologically-mediated events: enzyme production, hydrolysis, hexose fermentation, and pentose fermentation. Implementing this strategy requires development of microorganisms that both utilize cellulose, hemicellulosics, and other biomass components while also producing a product of interest at sufficiently high yield and concentrations. The feasibility of CBP is supported by kinetic and bioenergetic analysis. See van Walsum and Lynd (1998) Biotech. Bioeng. 58:316.

[0184] CBP offers the potential for lower cost and higher efficiency than processes featuring dedicated saccharolytic enzyme production. The benefits result in part from avoided capital costs, substrate and other raw materials, and utilities associated with saccharolytic enzyme production. In addition, several factors support the realization of higher rates of hydrolysis, and hence reduced reactor volume and capital investment using CBP, including enzyme-microbe synergy and the use of thermophilic organisms and/or complexed saccharolytic systems. Moreover, cellulose-adherent cellulolytic microorganisms are likely to compete successfully for products of cellulose hydrolysis with non-adhered microbes, e.g., contaminants, which could increase the stability of industrial processes based on microbial cellulose utilization. Progress in developing CBP-enabling microorganisms is being made through two strategies: engineering naturally occurring saccharolytic microorganisms to improve product-related properties, such as yield and titer; and engineering non-saccharolytic organisms that exhibit high product yields and titers to express a heterologous saccharolytic enzyme system enabling starch, cellulose, and, hemicellulose utilization.

### Starch and Cellulose Degradation

[0185] The degradation of starch into component sugar units proceeds via amylolytic enzymes. Amylase is an example of an amylolytic enzyme that is present in human saliva, where it begins the chemical process of digestion. The pancreas also makes amylase (alpha amylase) to hydrolyze dietary starch into disaccharides and trisaccharides which are converted by other enzymes to glucose to supply the body with energy. Plants and some bacteria also produce amylases. Amylases are glycoside hydrolases and act on α-1,4-glycosidic bonds.

[0186] Several amylolytic enzymes are implicated in starch hydrolysis. Alpha-amylases (EC 3.2.1.1) (alternate names: 1,4-α-D-glucan glucanohydrolase; glycogenase) are calcium metalloenzymes, i.e., completely unable to function in the absence of calcium. By acting at random locations along the starch chain, alpha-amylase breaks down long-chain carbohydrates, ultimately yielding maltotriose and maltose from amylose, or maltose, glucose and “limit dextrin” from amylopectin. Because it can act anywhere on the substrate, alpha-amylase tends to be faster-acting than beta-amylase. Another form of amylase, beta-amylase (EC 3.2.1.2) (alternate names: 1,4-α-D-glucan maltohydrolase; glycogenase; saccharogen amylase) catalyzes the hydrolysis of the second α-1,4 glycosidic bond, cleaving off two glucose units (maltose) at a time. The third amylase is gamma-amylase (EC 3.2.1.3) (alternate names: Glucan 1,4-α-glucosidase; amyloglucosidase; Exo-1,4-α-glucosidase; glucoamylase; lysosomal α-glucosidase; 1,4-α-D-glucan glucohydrolase). In addition to cleaving the last α(1-4)glycosidic linkages at the nonreducing end of amylose and amylopectin, yielding glucose, gamma-amylase will cleave α(1-6) glycosidic linkages.

[0187] A fourth enzyme, alpha-glucosidase, acts on maltose and other short malto-oligosaccharides produced by alpha-, beta-, and gamma-amylases, converting them to glucose.

[0188] Three major types of enzymatic activities degrade native cellulose. The first type is endoglucanases (1,413-D-glucan 4-glucanohydrolases; EC 3.2.1.4). Endoglucanases cut at random in the cellulose polysaccharide chain of amorphous cellulose, generating oligosaccharides of varying lengths and consequently new chain ends. The second type are exoglucanases, including cellodextrinases (1,413-D-glucan glucanohydrolases; EC 3.2.1.74) and cellobiohydrolases (1,413-D-glucan cellobiohydrolases; EC 3.2.1.91). Exoglucanases act in a processive manner on the reducing or non-reducing ends of cellulose polysaccharide chains, liberating either glucose (glucanohydrolases) or cellobiose (cellobiohydrolase) as major products. Exoglucanases can also act on microcrystalline cellulose, presumably peeling cellulose chains from the microcrystalline structure. The third type are β-glucosidases (β-glucoside glucohydrolases; EC 3.2.1.21). β-Glucosidases hydrolyze soluble cellodextrins and cellobiose to glucose units.

[0189] Even though yeast strains expressing enzymes for the production of fuel ethanol from whole grain or starch have been previously disclosed, the application has not been commercialized in the grain-based fuel ethanol industry, due to the relatively poor ability of the resulting strains to produce/tolerate high levels of ethanol. For example, U.S. Pat. No. 7,226,776 discloses that a polysaccharase enzyme expressing ethanologen can make ethanol directly from carbohydrate polymers, but the maximal ethanol titer demonstrated is 3.9 g/L. U.S. Pat. No. 5,422,267 discloses the use of a glucoamylase in yeast for production of alcoholic beverages; however, no commercially relevant titers of ethanol are disclosed.

### Heterologous Saccharolytic Enzymes

[0190] According to one aspect of the present invention, the expression of heterologous saccharolytic enzymes the recombinant microorganisms of the invention can be used advantageously to produce products such as ethanol from biomass sources. For example, cellulases from a variety of sources can be heterologously expressed to successfully increase efficiency of ethanol production. The saccharolytic enzymes can be from fungi, yeast, bacteria, plant, protozoan or termite sources. In some embodiments, the saccharolytic enzyme is from H. grisea, T aurantiacus, T emersonii, T reesei, C. lacteus, C. formosanus, N. takasagoensis, C. acinaciformis, M darwinensis, N. walkeri, S. fibuligera, C. lucknowense R. speratus, Thermobfida fusca, Clostridum thermocellum, Clostridium cellulolyticum, Clostridum josui, Bacillus pumilis, Cellulomonas fimi, Saccharophagus degradans, Piromyces equii, Neocallimastix patricarum or Arabidopsis thaliana.

[0191] In some embodiments, the cellulase for expression in the recombinant microorganisms of the invention is any cellulase disclosed in Table 4 or Table 7 in International Publication No. WO2011/153516, incorporated by reference herein in its entirety, or any cellulase suitable for expression in an appropriate host cell. In other embodiments, the amylase for expression in the recombinant microorganisms of the invention is any amylase such as alpha-amylases, beta-amylases, glucoamylases, alpha-glucosidases, pullulanase, or isopullulanase paralogues or orthologues, any amylase disclosed in Tables 15-19, preferably in Table 19, in International Publication No. WO2011/153516, incorporated by reference herein in its entirety, or any amylase suitable for expression in an appropriate host cell. In some embodiments of the invention, multiple saccharolytic enzymes from a single organism are co-expressed in the same recombinant microorganism. In some embodiments of the invention, multiple saccharolytic enzymes from different organisms are co-expressed in the same recombinant microorganism. In particular, saccharolytic enzymes from two, three, four, five, six, seven, eight, nine or more organisms can be co-expressed in the same recombinant microorganism. Similarly, the invention can encompass co-cultures of yeast strains, wherein the yeast strains express different saccharolytic enzymes. Co-cultures can include yeast strains expressing heterologous saccharolytic enzymes from the same organisms or from different organisms. Co-cultures can include yeast strains expressing saccharolytic enzymes from two, three, four, five, six, seven, eight, nine or more organisms.

[0192] Lignocellulases for expression in the recombinant microorganisms of the present invention include both endoglucanases and exoglucanases. Other lignocellulases for expression in the recombinant microorganisms of the invention include accessory enzymes which can act on the lignocellulosic material. The lignocellulases can be, for example, endoglucanases, glucosidases, cellobiohydrolases, xylanases, glucanases, xylosidases, xylan esterases, arabinofuranosidases, galactosidases, cellobiose phosphorylases, cellodextrin phosphorylases, mannanases, mannosidases, xyloglucanases, endoxylanases, glucuronidases, acetylxylanesterases, arabinofuranohydrolases, swollenins, glucuronyl esterases, expansins, pectinases, and feruoyl esterases. In some embodiments, the lignocellulases of the invention can be any suitable enzyme for digesting the desired lignocellulosic material.

[0193] In certain embodiments of the invention, the lignocellulase can be an endoglucanase, glucosidase, cellobiohydrolase, xylanase, glucanase, xylosidase, xylan esterase, arabinofuranosidase, galactosidase, cellobiose phosphorylase, cellodextrin phosphorylase, mannanase, mannosidase, xyloglucanase, endoxylanase, glucuronidase, acetylxylanesterase, arabinofuranohydrolase, swollenin, glucuronyl esterase, expansin, pectinase, and feruoyl esterase paralogue or orthologue. In particular embodiments, the lignocellulase is derived from any species named in Tables 4 and 7, in copending International Publication No. WO2011/153516, incorporated by reference herein.

### Xylose Metabolism

[0194] Xylose is a five-carbon monosaccharide that can be metabolized into useful products by a variety of organisms. There are two main pathways of xylose metabolism, each unique in the characteristic enzymes they utilize. One pathway is called the “Xylose Reductase-Xylitol Dehydrogenase” or XR-XDH pathway. Xylose reductase (XR) and xylitol dehydrogenase (XDH) are the two main enzymes used in this method of xylose degradation. XR, encoded by the XYL1 gene, is responsible for the reduction of xylose to xylitol and is aided by cofactors NADH or NADPH. Xylitol is then oxidized to xylulose by XDH, which is expressed through the XYL2 gene, and accomplished exclusively with the cofactor NAD⁺. Because of the varying cofactors needed in this pathway and the degree to which they are available for usage, an imbalance can result in an overproduction of xylitol byproduct and an inefficient production of desirable ethanol. Varying expression of the XR and XDH enzyme levels have been tested in the laboratory in the attempt to optimize the efficiency of the xylose metabolism pathway.

[0195] The other pathway for xylose metabolism is called the “Xylose Isomerase” (XI) pathway. Enzyme XI is responsible for direct conversion of xylose into xylulose, and does not proceed via a xylitol intermediate. Both pathways create xylulose, although the enzymes utilized are different. After production of xylulose both the XR-XDH and XI pathways proceed through the enzyme xylulokinase (XK), encoded on gene XKS1, to further modify xylulose into xylulose-5-phosphate where it then enters the pentose phosphate pathway for further catabolism. XI includes those enzymes that correspond to Enzyme Commission Number 5.3.1.5. Suitable xylose isomerases of the present invention include xylose isomerases derived from, for example, Piromyces sp., and B. thetaiotaomicron, although any xylose isomerase that functions when expressed in host cells of the invention can be used, including chimeric enzymes.

[0196] Piromyces sp. xylose isomerase nucleotide and amino acid sequences correspond to SEQ ID NO:107 and SEQ ID NO:108, respectively. B. thetaiotaomicron xylose isomerase nucleotide and amino acid sequences correspond to SEQ ID NO:109 and SEQ ID NO:110, respectively.

[0197] Studies on flux through the pentose phosphate pathway during xylose metabolism have revealed that limiting the speed of this step may be beneficial to the efficiency of fermentation to ethanol. Modifications to this flux that may improve ethanol production include a) lowering phosphoglucose isomerase activity, b) deleting the GND1 gene, and c) deleting the ZWF1 gene (Jeppsson et al., Appl. Environ. Microbiol. 68:1604-09 (2002)). Since the pentose phosphate pathway produces additional NADPH during metabolism, limiting this step will help to correct the already evident imbalance between NAD(P)H and NAD⁺ cofactors and reduce xylitol byproduct. In an additional embodiment, a native and/or heterologous phosphoketolase, an enzyme that participates in the PPP pathway, may be expressed in a recombinant microorganism of the invention. Phosphoketolases include enzymes that catalyze the conversion of D-xylulose 5-phosphate to D-glyceraldehyde 3-phosphate and dual specificity phosphoketolases that catalyze the conversion of D-fructose 6-phosphate to D-erythrose 4-phosphate. Phosphoketolases that can be employed in the invention include those disclosed in commonly owned U.S. Provisional Patent Application Nos. 61/728,450 and 61/792,731, which are incorporated by reference herein in their entireties.

[0198] An alternative approach is to improve the kinetics of the oxidative branch of the PPP over those of competing pathways. This could be achieved by various approaches, e.g., by directly increasing the expression of the rate-limiting enzyme(s) of the oxidative branch of the PPP pathway, such as glucose-6-P dehydrogenase (encoded endogenously by ZWF1), changing the expression of regulating transcription factors like Stb5p (Cadière, A., et al., “The Saccharomyces cerevisiae zinc factor protein Stb5p is required as a basal regulator of the pentose phosphate pathway,” FEMS Yeast Research 10:819-827 (2010)), or directly down-regulating the expression of genes involved in competing pathways like glucose-6-P isomerase (encoded by PGI1). Producing more CO₂ in the oxidative branch of the PPP would increase the availability of NADPH and increase the NADPH/NADP ratio. This would stimulate the flux of acetate-consuming pathways that (at least partially) consume NADPH, as would for example be the case for ethanol-to-isopropanol conversion that relies on a NADPH-consuming secondary alcohol dehydrogenase to convert acetone to isopropanol, or an acetate-to-ethanol pathway that uses a NADPH-consuming acetaldehyde dehydrogenase and/or alcohol dehydrogenase.

[0199] Another experiment comparing the two xylose metabolizing pathways revealed that the XI pathway was best able to metabolize xylose to produce the greatest ethanol yield, while the XR-XDH pathway reached a much faster rate of ethanol production (Karhumaa et al., Microb Cell Fact. 2007 Feb. 5, 6:5). See also International Publication No. WO2006/009434, incorporated herein by reference in its entirety.

[0200] In some embodiments, the recombinant microorganisms of the invention have the ability to metabolize xylose using one or more of the above enzymes.

[0201] Various genes involved in xylose metabolism may be overexpressed by the recombinant microorganisms of the present invention. In some embodiments, the recombinant microorganism overexpresses one or more of xylose isomerase (XylA), xylulokinase (XKS1), transketolase (TKL2), transaldolase (TAL1), ribose-5-phosphate ketol-isomerase (RKI1) and any combination thereof. Table 3 provides exemplary genes involved in xylose metabolism that can be engineered, as indicated, in the recombinant microorganisms of the invention:

TABLE 3

| Gene name | Modification | Organism | SEQ ID NO |
|---|---|---|---|
| TAL1 | Overexpression | Saccharomyces | 226 |
| | | cerevisiae | |
| XKS1 | Overexpression | Saccharomyces | 227 |
| | | cerevisiae | |
| TKL1 | Overexpression | Saccharomyces | 228 |
| | | cerevisiae | |
| RKI1 | Overexpression | Saccharomyces | 229 |
| | | cerevisiae | |
| BtXI | Overexpression | Bacteroides | 109 |
| | | thetaiotaomicron | |

### Arabinose Metabolism

[0202] Arabinose is a five-carbon monosaccharide that can be metabolized into useful products by a variety of organisms. L-Arabinose residues are found widely distributed among many heteropolysaccharides of different plant tissues, such as arabinans, arabinogalactans, xylans and arabinoxylans. Bacillus species in the soil participate in the early stages of plant material decomposition, and B. subtilis secretes three enzymes, an endo-arabanase and two arabinosidases, capable of releasing arabinosyl oligomers and L-arabinose from plant cell.

[0203] Three pathways for L-arabinose metabolism in microorganisms have been described. Many bacteria, including Escherichia coli, use arabinose isomerase (AraA; E.C. 5.3.1.4), ribulokinase (AraB; E.C. 2.7.1.16), and ribulose phosphate epimerase (AraD; E.C. 5.1.3.4) to sequentially convert L-arabinose to D-xylulose-5-phosphate through L-ribulose and L-ribulose 5-phosphate. See, e.g., Sa-Nogueira I, et al., Microbiology 143:957-69 (1997). The D-xylulose-5-phosphate then enters the pentose phosphate pathway for further catabolism. In the second pathway, L-arabinose is converted to L-2-keto-3-deoxyarabonate (L-KDA) by the consecutive action of enzymes arabinose dehydrogenase (ADH), arabinolactone (AL), and arabinonate dehydratase (AraC). See, e.g., Watanabe, S, et al., J. Biol. Chem. 281: 2612-2623 (2006). L-KDA can be further metabolized in two alternative pathways: 1) L-KDA conversion to 2-ketoglutarate via 2-ketoglutaric semialdehyde (KGSA) by L-KDA dehydratase and KGSA dehydrogenase or 2) L-KDA conversion to pyruvate and glycolaldehyde by L-KDA aldolase. In the third, fungal pathway, L-arabinose is converted to D-xylulose-5-phosphate through L-arabinitol, L-xylulose, and xylitol, by enzymes such as NAD(P)H-dependent aldose reductase (AR), L-arabinitol 4-dehydrogenase (ALDH), L-xylulose reductase (LXR), xylitol dehydrogenase (XylD), and xylulokinase (XylB). These, and additional proteins involved in arabinose metabolism and regulation may be found at http://www.nmpdr.org/FIG/subsys.cgi?user=&ssa_name=L-Arabinose_utilization&request=show_ssa, visited Jun. 20, 2013, which is incorporated by reference herein in its entirety.

[0204] AraC protein regulates expression of its own synthesis and the other genes of the Ara system. See Schleif, R., Trends Genet. 16(12):559-65 (2000). In the E. coli, the AraC protein positively and negatively regulates expression of the proteins required for the uptake and catabolism of the sugar L-arabinose. Homologs of AraC, such as regulatory proteins RhaR and RhaS of the rhamnose operon, have been identified that contain regions homologous to the DNA-binding domain of AraC (Leal, T. F. and de Sa-Nogueira, I., FEMS Microbiol Lett. 241(1):41-48 (2004)). Such arabinose regulatory proteins are referred to as the AraC/XylS family. See also, Mota, L. J., et al., Mol. Microbiol. 33(3):476-89 (1999); Mota, L. J., et al., J Bacteriol. 183(14):4190-201 (2001).

[0205] In E. coli, the transport of L-arabinose across the E. coli cytoplasmic membrane requires the expression of either the high-affinity transport operon, araFGH, a binding protein-dependent system on the low-affinity transport operon, araE, a proton symporter. Additional arabinose transporters include those identified from K. marxianus and P. guilliermondii, disclosed in U.S. Pat. No. 7,846,712, which is incorporated by reference herein.

[0206] In some embodiments, the recombinant microorganisms of the invention have the ability to metabolize arabinose using one or more of the above enzymes. Additional enzymes and/or strategies that can be employed for the metabolism of arabinose in the invention include those disclosed in commonly owned International Publication No. WO 2013/071112, which is incorporated by reference herein in its entirety.

### Trehalose Metabolism

[0207] Trehalose is an alpha-linked disaccharide formed through an α,α-1,1-glucoside bond between two α-glucose molecules. Trehalose is known to play a role as a storage carbohydrate in yeast and can be broken down into glucose by enzymes such as trehalase. Intracellular levels of trehalose in the yeast S. cerevisiae are well-regulated through balancing enzymatic synthesis and degradation. See Jules, M., et al., “New Insights into Trehalose Metabolism by Saccharomyces cerevisiae: NHT2 Encodes a Functional Cytosolic Trehalase, and Deletion of TPS1 Reveals ATH1p-Dependent Trehalose Mobilization,” Appl. Environ. Microbiol. 74(3):605-614 (2008). Trehalose also functions as a potential carbon source for microorganisms, including yeast. Yeast genes involved in the metabolism of trehalose include, but are not limited to, Ath1p, which is thought to extracellularly hydrolyze trehalose into two glucose units; the trehalose transporter Agt1p; and Nth1p, which is believed to hydrolyse the imported disaccharide. See Jules, M., et al. (2008).

[0208] In some embodiments, the recombinant microorganisms of the invention have the ability to metabolize trehalose using one or more of the above enzymes. Additionally, over expression of TPS1 and/or TPS2, and/or TSL1 may increase the intracellular pool of trehalose allowing for improved robustness. It was recently shown that overexpression of TPS1 and TPS2 improved the performance of a GPD1 mutant engineered to express GAPN from Bacillus cereus. See Guo, Z-P., et al., “Minimization of glycerol synthesis in industrial ethanol yeast without influencing its fermentation performance,” Metabolic Engineering 13(1):49-59 (2011). It has not been shown that overexpression of trehalose synthesis improves the performance of strains engineered to make formate nor has it been shown in combination with glycerol uptake genes such as STL1. In some embodiments TPS1 is from S. cerevisiae. S. cerevisiae TPS1 nucleotide and amino acid sequences correspond to SEQ ID NO:111 and SEQ ID NO:112, respectively. In some embodiments TPS2 is from S. cerevisiae. S. cerevisiae TPS2 nucleotide and amino acid sequences correspond to SEQ ID NO:113 and SEQ ID NO:114, respectively. In some embodiments TSL1 is from S. cerevisiae. S. cerevisiae TSL1 nucleotide and amino acid sequences correspond to SEQ ID NO:115 and SEQ ID NO:116, respectively. In some embodiments NTH1 is from S. cerevisiae. S. cerevisiae NTH1 nucleotide and amino acid sequences correspond to SEQ ID NO:117 and SEQ ID NO:118, respectively.

### Isopropanol Production

[0209] Production of isopropanol from carbohydrates has been shown to occur natively in certain organisms including those related to C. acetobutylicum. In addition, pathways for the recombinant production of isopropanol from carbohydrates in microorganisms have been engineered in E. coli and yeast. See, e.g., U.S. Patent Appl. Pub. No. 2008/0293125, which is incorporated by reference herein in its entirety. Additional methods and enzymes for recombinantly producing isopropanol are disclosed in commonly owned International Publication No. WO 2011/140386, which is incorporated by reference herein in its entirety. In certain embodiments, any of the above pathways may be engineered into the recombinant microorganism of the invention for the production of isopropanol.

### Microorganisms

[0210] The present invention includes multiple strategies for the development of microorganisms with the combination of substrate-utilization and product-formation properties required for CBP. The “native cellulolytic strategy” involves engineering naturally occurring cellulolytic microorganisms to improve product-related properties, such as yield and titer. The “recombinant cellulolytic strategy” involves engineering natively non-cellulolytic organisms that exhibit high product yields and titers to express a heterologous cellulase system that enables cellulose utilization or hemicellulose utilization or both.

[0211] Many bacteria have the ability to ferment simple hexose sugars into a mixture of acidic and pH-neutral products via the process of glycolysis. The glycolytic pathway is abundant and comprises a series of enzymatic steps whereby a six carbon glucose molecule is broken down, via multiple intermediates, into two molecules of the three carbon compound pyruvate. This process results in the net generation of ATP (biological energy supply) and the reduced cofactor NADH.

[0212] Pyruvate is an important intermediary compound of metabolism. For example, under aerobic conditions pyruvate may be oxidized to acetyl coenzyme A (acetyl-CoA), which then enters the tricarboxylic acid cycle (TCA), which in turn generates synthetic precursors, CO₂, and reduced cofactors. The cofactors are then oxidized by donating hydrogen equivalents, via a series of enzymatic steps, to oxygen resulting in the formation of water and ATP. This process of energy formation is known as oxidative phosphorylation.

[0213] Under anaerobic conditions (no available oxygen), fermentation occurs in which the degradation products of organic compounds serve as hydrogen donors and acceptors. Excess NADH from glycolysis is oxidized in reactions involving the reduction of organic substrates to products, such as lactate and ethanol. In addition, ATP is regenerated from the production of organic acids, such as acetate, in a process known as substrate level phosphorylation. Therefore, the fermentation products of glycolysis and pyruvate metabolism include a variety of organic acids, alcohols and CO₂.

[0214] Most facultative anaerobes metabolize pyruvate aerobically via pyruvate dehydrogenase (PDH) and the tricarboxylic acid cycle (TCA). Under anaerobic conditions, the main energy pathway for the metabolism of pyruvate is via pyruvate-formate-lyase (PFL) pathway to give formate and acetyl-CoA. Acetyl-CoA is then converted to acetate, via phosphotransacetylase (PTA) and acetate kinase (ACK) with the co-production of ATP, or reduced to ethanol via acetalaldehyde dehydrogenase (ACDH) and alcohol dehydrogenase (ADH). In order to maintain a balance of reducing equivalents, excess NADH produced from glycolysis is re-oxidized to NAD⁺ by lactate dehydrogenase (LDH) during the reduction of pyruvate to lactate. NADH can also be re-oxidized by ACDH and ADH during the reduction of acetyl-CoA to ethanol, but this is a minor reaction in cells with a functional LDH.

[0215] Alternate pathways from acetate to acetyl-CoA can be achieved by the expression of the bacterial system of PTA and ACK. These two enzymes can act sequentially to produce acetyl-CoA from acetate. Due to the difference in co-factors between PTA/ACK and ACS, this pathway could have higher activity in vivo when heterologously expressed. Sources for PTA and ACK can come from a large variety of bacterial sources including but not limited to Escherichia, Thermoanaerobacter, Clostridia, and Bacillus species. Examples of expression of PTA and ACK for the production of alcohols and other desired products are disclosed in commonly owned International Publication No. WO 2011/140386, which is incorporated by reference herein in its entirety.

[0216] In some embodiments, the PTA is from Bifidobacterium adolescentis. Bifidobacterium adolescentis PTA nucleotide and amino acid sequences correspond to SEQ ID NO:119 and SEQ ID NO:120, respectively. In some embodiments, the PTA is from Leuconostoc mesenteroides. Leuconostoc mesenteroides PTA nucleotide and amino acid sequences correspond to SEQ ID NO:121 and SEQ ID NO:122, respectively. In some embodiments, the PTA is from Oenococcus oenii. Oenococcus oenii PTA nucleotide and amino acid sequences correspond to SEQ ID NO:123 and SEQ ID NO: 124, respectively. In some embodiments, the ACK is from Bifidobacterium adolescentis. Bifidobacterium adolescentis ACK nucleotide and amino acid sequences correspond to SEQ ID NO: 125 and SEQ ID NO:126, respectively. In some embodiments, ACK is from Leuconostoc mesenteroides. Leuconostoc mesenteroides ACK nucleotide and amino acid sequences correspond to SEQ ID NO:127 and SEQ ID NO:128, respectively. In some embodiments, the ACK is from Oenococcus oenii. Oenococcus oenii ACK nucleotide and amino acid sequences correspond to SEQ ID NO:129 and SEQ ID NO:130, respectively.

### Host Cells

[0217] Host cells useful in the present invention include any prokaryotic or eukaryotic cells; for example, microorganisms selected from bacterial, algal, and yeast cells. Among host cells thus suitable for the present invention are microorganisms, for example, of the genera Aeromonas, Aspergillus, Bacillus, Escherichia, Kluyveromyces, Pichia, Rhodococcus, Saccharomyces and Streptomyces.

[0218] In some embodiments, the host cells are microorganisms. In one embodiment the microorganism is a yeast. According to the present invention the yeast host cell can be, for example, from the genera Saccharomyces, Kluyveromyces, Candida, Pichia, Schizosaccharomyces, Hansenula, Kloeckera, Schwanniomyces, and Yarrowia. Yeast species as host cells may include, for example, S. cerevisiae, S. bulderi, S. barnetti, S. exiguus, S. uvarum, S. diastaticus, K. lactis, K. marxianus, or K. fragilis. In some embodiments, the yeast is selected from the group consisting of Saccharomyces cerevisiae, Schizzosaccharomyces pombe, Candida albicans, Pichia pastoris, Pichia stipitis, Yarrowia hpolytica, Hansenula polymorpha, Phaffia rhodozyma, Candida utilis, Arxula adeninivorans, Debaryomyces hansenii, Debaryomyces polymorphus, Schizosaccharomyces pombe and Schwanniomyces occidentalis. In one particular embodiment, the yeast is Saccharomyces cerevisiae. In another embodiment, the yeast is the S. cerevisiae strain PE-2. In yet another embodiment, the yeast is a thermotolerant Saccharomyces cerevisiae. The selection of an appropriate host is deemed to be within the scope of those skilled in the art from the teachings herein.

[0219] In some embodiments, the host cell is an oleaginous cell. The oleaginous host cell can be an oleaginous yeast cell. For example, the oleaginous yeast host cell can be from the genera Blakeslea, Candida, Cryptococcus, Cunninghamella, Lipomyces, Mortierella, Mucor, Phycomyces, Pythium, Rhodosporidum, Rhodotorula, Trichosporon or Yarrowia. According to the present invention, the oleaginous host cell can be an oleaginous microalgae host cell. For example, the oleaginous microalgea host cell can be from the genera Thraustochytrium or Schizochytrium. Biodiesel could then be produced from the triglyceride produced by the oleaginous organisms using conventional lipid transesterification processes. In some particular embodiments, the oleaginous host cells can be induced to secrete synthesized lipids. Embodiments using oleaginous host cells are advantageous because they can produce biodiesel from lignocellulosic feedstocks which, relative to oilseed substrates, are cheaper, can be grown more densely, show lower life cycle carbon dioxide emissions, and can be cultivated on marginal lands.

[0220] In some embodiments, the host cell is a thermotolerant host cell. Thermotolerant host cells can be particularly useful in simultaneous saccharification and fermentation processes by allowing externally produced cellulases and ethanol-producing host cells to perform optimally in similar temperature ranges.

[0221] Thermotolerant host cells can include, for example, Issatchenkia orientalis, Pichia mississippiensis, Pichia mexicana, Pichia farinosa, Clavispora opuntiae, Clavispora lusitaniae, Candida mexicana, Hansenula polymorpha and Kluyveromyces host cells. In some embodiments, the thermotolerant cell is an S. cerevisiae strain, or other yeast strain, that has been adapted to grow in high temperatures, for example, by selection for growth at high temperatures in a cytostat.

[0222] In some particular embodiments, the host cell is a Kluyveromyces host cell. For example, the Kluyveromyces host cell can be a K. lactis, K. marxianus, K. blattae, K. phaffii, K. yarrowii, K. aestuarii, K. dobzhanskii, K. wickerhamii K. thermotolerans, or K. waltii host cell. In one embodiment, the host cell is a K. lactis, or K. marxianus host cell. In another embodiment, the host cell is a K. marxianus host cell.

[0223] In some embodiments, the thermotolerant host cell can grow at temperatures above about 30° C., about 31° C., about 32° C., about 33° C., about 34° C., about 35° C., about 36° C., about 37° C., about 38° C., about 39° C., about 40° C., about 41° C. or about 42° C. In some embodiments of the present invention the thermotolerant host cell can produce ethanol from cellulose at temperatures above about 30° C., about 31° C., about 32° C., about 33° C., about 34° C., about 35° C., about 36° C., about 37° C., about 38° C., about 39° C., about 40° C., about 41° C., about 42° C., or about 43° C., or about 44° C., or about 45° C., or about 50° C.

[0224] In some embodiments of the present invention, the thermotolerant host cell can grow at temperatures from about 30° C. to 60° C., about 30° C. to 55° C., about 30° C. to 50° C., about 40° C. to 60° C., about 40° C. to 55° C. or about 40° C. to 50° C. In some embodiments of the present invention, the thermotolerant host cell can produce ethanol from cellulose at temperatures from about 30° C. to 60° C., about 30° C. to 55° C., about 30° C. to 50° C., about 40° C. to 60° C., about 40° C. to 55° C. or about 40° C. to 50° C.

[0225] In some embodiments, the host cell has the ability to metabolize xylose. Detailed information regarding the development of the xylose-utilizing technology can be found in the following publications: Kuyper M et al. FEMS Yeast Res. 4: 655-64 (2004), Kuyper M et al. FEMS Yeast Res. 5:399-409 (2005), and Kuyper M et al. FEMS Yeast Res. 5:925-34 (2005), which are herein incorporated by reference in their entirety. For example, xylose-utilization can be accomplished in S. cerevisiae by heterologously expressing the xylose isomerase gene, XylA, e.g., from the anaerobic fungus Piromyces sp. E2, overexpressing five S. cerevisiae enzymes involved in the conversion of xylulose to glycolytic intermediates (xylulokinase, ribulose 5-phosphate isomerase, ribulose 5-phosphate epimerase, transketolase and transaldolase) and deleting the GRE3 gene encoding aldose reductase to minimize xylitol production.

[0226] In some embodiments, the host cell has the ability to metabolize arabinose. For example, arabinose-utilization can be accomplished by heterologously expressing, e.g., one or more of arabinose isomerase, ribulokinase, or ribulose phosphate epimerase. The host cells can contain antibiotic markers or can contain no antibiotic markers.

[0227] In certain embodiments, the host cell is a microorganism that is a species of the genera Thermoanaerobacterium, Thermoanaerobacter, Clostridium, Geobacillus, Saccharococcus, Paenibacillus, Bacillus, Caldicellulosiruptor, Anaerocellum, or Anoxybacillus. In certain embodiments, the host cell is a bacterium selected from the group consisting of: Thermoanaerobacterium thermosulfurigenes, Thermoanaerobacterium aotearoense, Thermoanaerobacterium polysaccharolyticum, Thermoanaerobacterium zeae, Thermoanaerobacterium xylanolyticum, Thermoanaerobacterium saccharolyticum, Thermoanaerobium brockii, Thermoanaerobacterium thermosaccharolyticum, Thermoanaerobacter thermohydrosulfuricus, Thermoanaerobacter ethanolicus, Thermoanaerobacter brocki, Clostridium thermocellum, Clostridium cellulolyticum, Clostridium phytofermentans, Clostridium straminosolvens, Geobacillus thermoglucosidasius, Geobacillus stearothermophilus, Saccharococcus caldoxylosilyticus, Saccharoccus thermophilus, Paenibacillus campinasensis, Bacillus flavothermus, Anoxybacillus kamchatkensis, Anoxybacillus gonensis, Caldicellulosiruptor acetigenus, Caldicellulosiruptor saccharolyticus, Caldicellulosiruptor kristjanssonii, Caldicellulosiruptor owensensis, Caldicellulosiruptor lactoaceticus, and Anaerocellum thermophilum. In certain embodiments, the host cell is Clostridium thermocellum, Clostridium cellulolyticum, or Thermoanaerobacterium saccharolyticum.

### Codon Optimized Polynucleotides

[0228] The polynucleotides encoding heterologous cellulases can be codon-optimized. As used herein the term “codon-optimized coding region” means a nucleic acid coding region that has been adapted for expression in the cells of a given organism by replacing at least one, or more than one, or a significant number, of codons with one or more codons that are more frequently used in the genes of that organism.

[0229] In general, highly expressed genes in an organism are biased towards codons that are recognized by the most abundant tRNA species in that organism. One measure of this bias is the “codon adaptation index” or “CAI,” which measures the extent to which the codons used to encode each amino acid in a particular gene are those which occur most frequently in a reference set of highly expressed genes from an organism.

[0230] The CAI of codon optimized sequences of the present invention corresponds to between about 0.8 and 1.0, between about 0.8 and 0.9, or about 1.0. A codon optimized sequence may be further modified for expression in a particular organism, depending on that organism's biological constraints. For example, large runs of “As” or “Ts” (e.g., runs greater than 3, 4, 5, 6, 7, 8, 9, or 10 consecutive bases) can be removed from the sequences if these are known to effect transcription negatively. Furthermore, specific restriction enzyme sites may be removed for molecular cloning purposes. Examples of such restriction enzyme sites include PacI, AscI, BamHI, BglII, EcoRI and XhoI. Additionally, the DNA sequence can be checked for direct repeats, inverted repeats and mirror repeats with lengths of ten bases or longer, which can be modified manually by replacing codons with “second best” codons, i.e., codons that occur at the second highest frequency within the particular organism for which the sequence is being optimized.

[0231] Deviations in the nucleotide sequence that comprise the codons encoding the amino acids of any polypeptide chain allow for variations in the sequence coding for the gene. Since each codon consists of three nucleotides, and the nucleotides comprising DNA are restricted to four specific bases, there are 64 possible combinations of nucleotides, 61 of which encode amino acids (the remaining three codons encode signals ending translation). The “genetic code” which shows which codons encode which amino acids is reproduced herein as Table 4. As a result, many amino acids are designated by more than one codon. For example, the amino acids alanine and proline are coded for by four triplets, serine and arginine by six, whereas tryptophan and methionine are coded by just one triplet. This degeneracy allows for DNA base composition to vary over a wide range without altering the amino acid sequence of the proteins encoded by the DNA.

TABLE 4
The Standard Genetic Code

| | T | C | A | G |
|---|---|---|---|---|
| T | TTT Phe (F) | TCT Ser (S) | TAT Tyr (Y) | TGT Cys (C) |
| | TTC Phe (F) | TCC Ser (S) | TAC Tyr (Y) | TGC |
| | TTA Leu (L) | TCA Ser (S) | TAA Ter | TGA Ter |
| | TTG Leu (L) | TCG Ser (S) | TAG Ter | TGG Trp (W) |
| C | CTT Leu (L) | CCT Pro (P) | CAT His (H) | CGT Arg (R) |
| | CTC Leu (L) | CCC Pro (P) | CAC His (H) | CGC Arg (R) |
| | CTA Leu (L) | CCA Pro (P) | CAA Gln (Q) | CGA Arg (R) |
| | CTG Leu (L) | CCG Pro (P) | CAG Gln (Q) | CGG Arg (R) |
| A | ATT Ile (I) | ACT Thr (T) | AAT Asn (N) | AGT Ser (S) |
| | ATC Ile (I) | ACC Thr (T) | AAC Asn (N) | AGC Ser (S) |
| | ATA Ile (I) | ACA Thr (T) | AAA Lys (K) | AGA Arg (R) |
| | ATG Met (M) | ACG Thr (T) | AAG Lys (K) | AGG Arg (R) |
| G | GTT Val (V) | GCT Ala (A) | GAT Asp (D) | GGT Gly (G) |
| | GTC Val (V) | GCC Ala (A) | GAC Asp (D) | GGC Gly (G) |
| | GTA Val (V) | GCA Ala (A) | GAA Glu (E) | GGA Gly (G) |
| | GTG Val (V) | GCG Ala (A) | GAG Glu (E) | GGG Gly (G) |

[0232] Many organisms display a bias for use of particular codons to code for insertion of a particular amino acid in a growing peptide chain. Codon preference or codon bias, differences in codon usage between organisms, is afforded by degeneracy of the genetic code, and is well documented among many organisms. Codon bias often correlates with the efficiency of translation of messenger RNA (mRNA), which is in turn believed to be dependent on, inter alia, the properties of the codons being translated and the availability of particular transfer RNA (tRNA) molecules. The predominance of selected tRNAs in a cell is generally a reflection of the codons used most frequently in peptide synthesis. Accordingly, genes can be tailored for optimal gene expression in a given organism based on codon optimization.

[0233] Given the large number of gene sequences available for a wide variety of animal, plant and microbial species, it is possible to calculate the relative frequencies of codon usage. Codon usage tables are readily available, for example, at www.kazusa.or.jp/codon/(visited Jun. 20, 2013), and these tables can be adapted in a number of ways. See Nakamura, Y., et al. “Codon usage tabulated from the international DNA sequence databases: status for the year 2000,” Nucl. Acids Res. 28:292 (2000). Codon usage tables for yeast, calculated from GenBank Release 128.0 [15 Feb. 2002], are reproduced below as Table 52. This table uses mRNA nomenclature, and so instead of thymine (T) which is found in DNA, the tables use uracil (U) which is found in RNA. The table has been adapted so that frequencies are calculated for each amino acid, rather than for all 64 codons.

TABLE 5
Codon Usage Table for Saccharomyces cerevisiae Genes

| | | | Frequency per |
|---|---|---|---|
| Amino Acid | Codon | Number | hundred |
| Phe | UUU | 170666 | 26.1 |
| Phe | UUC | 120510 | 18.4 |
| Leu | UUA | 170884 | 26.2 |
| Leu | UUG | 177573 | 27.2 |
| Leu | CUU | 80076 | 12.3 |
| Leu | CUC | 35545 | 5.4 |
| Leu | CUA | 87619 | 13.4 |
| Leu | CUG | 68494 | 10.5 |
| Ile | AUU | 196893 | 30.1 |
| Ile | AUC | 112176 | 17.2 |
| Ile | AUA | 116254 | 17.8 |
| Met | AUG | 136805 | 20.9 |
| Val | GUU | 144243 | 22.1 |
| Val | GUC | 76947 | 11.8 |
| Val | GUA | 76927 | 11.8 |
| Val | GUG | 70337 | 10.8 |
| Ser | UCU | 153557 | 23.5 |
| Ser | UCC | 92923 | 14.2 |
| Ser | UCA | 122028 | 18.7 |
| Ser | UCG | 55951 | 8.6 |
| Ser | AGU | 92466 | 14.2 |
| Ser | AGC | 63726 | 9.8 |
| Pro | CCU | 88263 | 13.5 |
| Pro | CCC | 44309 | 6.8 |
| Pro | CCA | 119641 | 18.3 |
| Pro | CCG | 34597 | 5.3 |
| Thr | ACU | 132522 | 20.3 |
| Thr | ACC | 83207 | 12.7 |
| Thr | ACA | 116084 | 17.8 |
| Thr | ACG | 52045 | 8.0 |
| Ala | GCU | 138358 | 21.2 |
| Ala | GCC | 82357 | 12.6 |
| Ala | GCA | 105910 | 16.2 |
| Ala | GCG | 40358 | 6.2 |
| Tyr | UAU | 122728 | 18.8 |
| Tyr | UAC | 96596 | 14.8 |
| His | CAU | 89007 | 13.6 |
| His | CAC | 50785 | 7.8 |
| Gln | CAA | 178251 | 27.3 |
| Gln | CAG | 79121 | 12.1 |
| Asn | AAU | 233124 | 35.7 |
| Asn | AAC | 162199 | 24.8 |
| Lys | AAA | 273618 | 41.9 |
| Lys | AAG | 201361 | 30.8 |
| Asp | GAU | 245641 | 37.6 |
| Asp | GAC | 132048 | 20.2 |
| Glu | GAA | 297944 | 45.6 |
| Glu | GAG | 125717 | 19.2 |
| Cys | UGU | 52903 | 8.1 |
| Cys | UGC | 31095 | 4.8 |
| Trp | UGG | 67789 | 10.4 |
| Arg | CGU | 41791 | 6.4 |
| Arg | CGC | 16993 | 2.6 |
| Arg | CGA | 19562 | 3.0 |
| Arg | CGG | 11351 | 1.7 |
| Arg | AGA | 139081 | 21.3 |
| Arg | AGG | 60289 | 9.2 |
| Gly | GGU | 156109 | 23.9 |
| Gly | GGC | 63903 | 9.8 |
| Gly | GGA | 71216 | 10.9 |
| Gly | GGG | 39359 | 6.0 |
| Stop | UAA | 6913 | 1.1 |
| Stop | UAG | 3312 | 0.5 |
| Stop | UGA | 4447 | 0.7 |

[0234] By utilizing this or similar tables, one of ordinary skill in the art can apply the frequencies to any given polypeptide sequence, and produce a nucleic acid fragment of a codon-optimized coding region which encodes the polypeptide, but which uses codons optimal for a given species. Codon-optimized coding regions can be designed by various different methods.

[0235] In one method, a codon usage table is used to find the single most frequent codon used for any given amino acid, and that codon is used each time that particular amino acid appears in the polypeptide sequence. For example, referring to Table 4 above, for leucine, the most frequent codon is UUG, which is used 27.2% of the time. Thus all the leucine residues in a given amino acid sequence would be assigned the codon UUG.

[0236] In another method, the actual frequencies of the codons are distributed randomly throughout the coding sequence. Thus, using this method for optimization, if a hypothetical polypeptide sequence had 100 leucine residues, referring to Table 4 for frequency of usage in the S. cerevisiae, about 5, or 5% of the leucine codons would be CUC, about 11, or 11% of the leucine codons would be CUG, about 12, or 12% of the leucine codons would be CUU, about 13, or 13% of the leucine codons would be CUA, about 26, or 26% of the leucine codons would be UUA, and about 27, or 27% of the leucine codons would be UUG.

[0237] These frequencies would be distributed randomly throughout the leucine codons in the coding region encoding the hypothetical polypeptide. As will be understood by those of ordinary skill in the art, the distribution of codons in the sequence can vary significantly using this method; however, the sequence always encodes the same polypeptide.

[0238] When using the methods above, the term “about” is used precisely to account for fractional percentages of codon frequencies for a given amino acid. As used herein, “about” is defined as one amino acid more or one amino acid less than the value given. The whole number value of amino acids is rounded up if the fractional frequency of usage is 0.50 or greater, and is rounded down if the fractional frequency of use is 0.49 or less. Using again the example of the frequency of usage of leucine in human genes for a hypothetical polypeptide having 62 leucine residues, the fractional frequency of codon usage would be calculated by multiplying 62 by the frequencies for the various codons. Thus, 7.28 percent of 62 equals 4.51 UUA codons, or “about 5,” i.e., 4, 5, or 6 UUA codons, 12.66 percent of 62 equals 7.85 UUG codons or “about 8,” i.e., 7, 8, or 9 UUG codons, 12.87 percent of 62 equals 7.98 CUU codons, or “about 8,” i.e., 7, 8, or 9 CUU codons, 19.56 percent of 62 equals 12.13 CUC codons or “about 12,” i.e., 11, 12, or 13 CUC codons, 7.00 percent of 62 equals 4.34 CUA codons or “about 4,” i.e., 3, 4, or 5 CUA codons, and 40.62 percent of 62 equals 25.19 CUG codons, or “about 25,” i.e., 24, 25, or 26 CUG codons.

[0239] Randomly assigning codons at an optimized frequency to encode a given polypeptide sequence, can be done manually by calculating codon frequencies for each amino acid, and then assigning the codons to the polypeptide sequence randomly. Additionally, various algorithms and computer software programs are readily available to those of ordinary skill in the art. For example, the “EditSeq” function in the Lasergene Package, available from DNAstar, Inc., Madison, Wis., the backtranslation function in the VectorNTl Suite, available from InforMax, Inc., Bethesda, Md., and the “backtranslate” function in the GCG—Wisconsin Package, available from Accelrys, Inc., San Diego, Calif. In addition, various resources are publicly available to codon-optimize coding region sequences, e.g., the “backtranslation” function at www.entelechon.com/2008/10/backtranslation-tool/ (visited Jun. 20, 2013) and the “backtranseq” function Jun. 20, 2013). Constructing a rudimentary algorithm to assign codons based on a given frequency can also easily be accomplished with basic mathematical functions by one of ordinary skill in the art.

[0240] A number of options are available for synthesizing codon optimized coding regions designed by any of the methods described above, using standard and routine molecular biological manipulations well known to those of ordinary skill in the art. In one approach, a series of complementary oligonucleotide pairs of 80-90 nucleotides each in length and spanning the length of the desired sequence is synthesized by standard methods. These oligonucleotide pairs are synthesized such that upon annealing, they form double stranded fragments of 80-90 base pairs, containing cohesive ends, e.g., each oligonucleotide in the pair is synthesized to extend 3, 4, 5, 6, 7, 8, 9, 10, or more bases beyond the region that is complementary to the other oligonucleotide in the pair. The single-stranded ends of each pair of oligonucleotides is designed to anneal with the single-stranded end of another pair of oligonucleotides. The oligonucleotide pairs are allowed to anneal, and approximately five to six of these double-stranded fragments are then allowed to anneal together via the cohesive single stranded ends, and then they ligated together and cloned into a standard bacterial cloning vector, for example, a TOPO® vector available from Invitrogen Corporation, Carlsbad, Calif. The construct is then sequenced by standard methods. Several of these constructs consisting of 5 to 6 fragments of 80 to 90 base pair fragments ligated together, i.e., fragments of about 500 base pairs, are prepared, such that the entire desired sequence is represented in a series of plasmid constructs. The inserts of these plasmids are then cut with appropriate restriction enzymes and ligated together to form the final construct. The final construct is then cloned into a standard bacterial cloning vector, and sequenced. Additional methods would be immediately apparent to the skilled artisan. In addition, gene synthesis is readily available commercially.

[0241] In additional embodiments, a full-length polypeptide sequence is codon-optimized for a given species resulting in a codon-optimized coding region encoding the entire polypeptide, and then nucleic acid fragments of the codon-optimized coding region, which encode fragments, variants, and derivatives of the polypeptide are made from the original codon-optimized coding region. As would be well understood by those of ordinary skill in the art, if codons have been randomly assigned to the full-length coding region based on their frequency of use in a given species, nucleic acid fragments encoding fragments, variants, and derivatives would not necessarily be fully codon optimized for the given species. However, such sequences are still much closer to the codon usage of the desired species than the native codon usage. The advantage of this approach is that synthesizing codon-optimized nucleic acid fragments encoding each fragment, variant, and derivative of a given polypeptide, although routine, would be time consuming and would result in significant expense.

[0242] Transposons

[0243] To select for foreign DNA that has entered a host it is preferable that the DNA be stably maintained in the organism of interest. With regard to plasmids, there are two processes by which this can occur. One is through the use of replicative plasmids. These plasmids have origins of replication that are recognized by the host and allow the plasmids to replicate as stable, autonomous, extrachromosomal elements that are partitioned during cell division into daughter cells. The second process occurs through the integration of a plasmid onto the chromosome. This predominately happens by homologous recombination and results in the insertion of the entire plasmid, or parts of the plasmid, into the host chromosome. Thus, the plasmid and selectable marker(s) are replicated as an integral piece of the chromosome and segregated into daughter cells. Therefore, to ascertain if plasmid DNA is entering a cell during a transformation event through the use of selectable markers requires the use of a replicative plasmid or the ability to recombine the plasmid onto the chromosome. These qualifiers cannot always be met, especially when handling organisms that do not have a suite of genetic tools.

[0244] One way to avoid issues regarding plasmid-associated markers is through the use of transposons. A transposon is a mobile DNA element, defined by mosaic DNA sequences that are recognized by enzymatic machinery referred to as a transposase. The function of the transposase is to randomly insert the transposon DNA into host or target DNA. A selectable marker can be cloned onto a transposon by standard genetic engineering. The resulting DNA fragment can be coupled to the transposase machinery in an in vitro reaction and the complex can be introduced into target cells by electroporation. Stable insertion of the marker onto the chromosome requires only the function of the transposase machinery and alleviates the need for homologous recombination or replicative plasmids.

[0245] The random nature associated with the integration of transposons has the added advantage of acting as a form of mutagenesis. Libraries can be created that comprise amalgamations of transposon mutants. These libraries can be used in screens or selections to produce mutants with desired phenotypes. For instance, a transposon library of a CBP organism could be screened for the ability to produce more ethanol, or less lactic acid and/or more acetate.

[0246] Native Cellulolytic Strategy

[0247] Naturally occurring cellulolytic microorganisms are starting points for CBP organism development via the native strategy. Anaerobes and facultative anaerobes are of particular interest. The primary objective is to engineer the metabolization of biomass to solvents, including but not limited to, acetone, isopropanol, ethyl acetate, or ethanol. Metabolic engineering of mixed-acid fermentations in relation to, for example, ethanol production, has been successful in the case of mesophilic, non-cellulolytic, enteric bacteria. Recent developments in suitable gene-transfer techniques allow for this type of work to be undertaken with cellulolytic bacteria.

[0248] Recombinant Cellulolytic Strategy

[0249] Non-cellulolytic microorganisms with desired product-formation properties are starting points for CBP organism development by the recombinant cellulolytic strategy. The primary objective of such developments is to engineer a heterologous cellulase system that enables growth and fermentation on pretreated lignocellulose. The heterologous production of cellulases has been pursued primarily with bacterial hosts producing ethanol at high yield (engineered strains of E. coli, Klebsiella oxytoca, and Zymomonas mobilis) and the yeast Saccharomyces cerevisiae. Cellulase expression in strains of K. oxytoca resulted in increased hydrolysis yields—but not growth without added cellulase—for microcrystalline cellulose, and anaerobic growth on amorphous cellulose. Although dozens of saccharolytic enzymes have been functionally expressed in S. cerevisiae, anaerobic growth on cellulose as the result of such expression has not been definitively demonstrated.

[0250] Aspects of the present invention relate to the use of thermophilic or mesophilic microorganisms as hosts for modification via the native cellulolytic strategy. Their potential in process applications in biotechnology stems from their ability to grow at relatively high temperatures with attendant high metabolic rates, production of physically and chemically stable enzymes, and elevated yields of end products. Major groups of thermophilic bacteria include eubacteria and archaebacteria. Thermophilic eubacteria include: phototropic bacteria, such as cyanobacteria, purple bacteria, and green bacteria; Gram-positive bacteria, such as Bacillus, Clostridium, Lactic acid bacteria, and Actinomyces; and other eubacteria, such as Thiobacillus, Spirochete, Desulfotomaculum, Gram-negative aerobes, Gram-negative anaerobes, and Thermotoga. Within archaebacteria are considered Methanogens, extreme thermophiles (an art-recognized term), and Thermoplasma. In certain embodiments, the present invention relates to Gram-negative organotrophic thermophiles of the genera Thermus, Gram-positive eubacteria, such as genera Clostridium, and also which comprise both rods and cocci, genera in group of eubacteria, such as Thermosipho and Thermotoga, genera of Archaebacteria, such as Thermococcus, Thermoproteus (rod-shaped), Thermofilum (rod-shaped), Pyrodictium, Acidianus, Sulfolobus, Pyrobaculum, Pyrococcus, Thermodiscus, Staphylothermus, Desulfurococcus, Archaeoglobus, and Methanopyrus. Some examples of thermophilic or mesophilic (including bacteria, prokaryotic microorganism, and fungi), which may be suitable for the present invention include, but are not limited to: Clostridium thermosulfurogenes, Clostridium cellulolyticum, Clostridium thermocellum, Clostridium thermohydrosulfuricum, Clostridium thermoaceticum, Clostridium thermosaccharolyticum, Clostridium tartarivorum, Clostridium thermocellulaseum, Clostridium phytofermentans, Clostridium straminosolvens, Thermoanaerobacterium thermosaccarolyticum, Thermoanaerobacterium saccharolyticum, Thermobacteroides acetoethylicus, Thermoanaerobium brockii, Methanobacterium thermoautotrophicum, Anaerocellum thermophilium, Pyrodictium occultum, Thermoproteus neutrophilus, Thermofilum librum, Thermothrix thioparus, Desulfovibrio thermophilus, Thermoplasma acidophilum, Hydrogenomonas thermophilus, Thermomicrobium roseum, Thermus flavas, Thermus ruber, Pyrococcus furiosus, Thermus aquaticus, Thermus thermophilus, Chloroflexus aurantiacus, Thermococcus litoralis, Pyrodictium abyssi, Bacillus stearothermophilus, Cyanidium caldarium, Mastigocladus laminosus, Chlamydothrix calidissima, Chlamydothrix penicillata, Thiothrix carnea, Phormidium tenuissimum, Phormidium geysericola, Phormidium subterraneum, Phormidium bijahensi, Oscillatoria filiformis, Synechococcus lividus, Chloroflexus aurantiacus, Pyrodictium brockii, Thiobacillus thiooxidans, Sulfolobus acidocaldarius, Thiobacillus thermophilica, Bacillus stearothermophilus, Cercosulcifer hamathensis, Vahlkampfia reichi, Cyclidium citrullus, Dactylaria gallopava, Synechococcus lividus, Synechococcus elongatus, Synechococcus minervae, Synechocystis aquatilus, Aphanocapsa thermalis, Oscillatoria terebriformis, Oscillatoria amphibia, Oscillatoria germinata, Oscillatoria okenii, Phormidium laminosum, Phormidium parparasiens, Symploca thermalis, Bacillus acidocaldarias, Bacillus coagulans, Bacillus thermocatenalatus, Bacillus licheniformis, Bacillus pamilas, Bacillus macerans, Bacillus circulans, Bacillus laterosporus, Bacillus brevis, Bacillus subtilis, Bacillus sphaericus, Desulfotomaculum nigrificans, Streptococcus thermophilus, Lactobacillus thermophilus, Lactobacillus bulgaricus, Bifidobacterium thermophilum, Streptomyces fragmentosporus, Streptomyces thermonitrificans, Streptomyces thermovulgaris, Pseudonocardia thermophila, Thermoactinomyces vulgaris, Thermoactinomyces sacchari, Thermoactinomyces candidas, Thermomonospora curvata, Thermomonospora viridis, Thermomonospora citrina, Microbispora thermodiastatica, Microbispora aerata, Microbispora bispora, Actinobifida dichotomica, Actinobifida chromogena, Micropolyspora caesia, Micropolyspora faeni, Micropolyspora cectivugida, Micropolyspora cabrobrunea, Micropolyspora thermovirida, Micropolyspora viridinigra, Methanobacterium thermoautothropicum, Caldicellulosiruptor acetigenus, Caldicellulosiruptor saccharolyticus, Caldicellulosiruptor kristjanssonii, Caldicellulosiruptor owensensis, Caldicellulosiruptor lactoaceticus, variants thereof, and/or progeny thereof.

[0251] In particular embodiments, the present invention relates to thermophilic bacteria selected from the group consisting of Clostridium cellulolyticum, Clostridium thermocellum, and Thermoanaerobacterium saccharolyticum.

[0252] In certain embodiments, the present invention relates to thermophilic bacteria selected from the group consisting of Fervidobacterium gondwanense, Clostridium thermolacticum, Moorella sp., and Rhodothermus marinus.

[0253] In certain embodiments, the present invention relates to thermophilic bacteria of the genera Thermoanaerobacterium or Thermoanaerobacter, including, but not limited to, species selected from the group consisting of: Thermoanaerobacterium thermosulfurigenes, Thermoanaerobacterium aotearoense, Thermoanaerobacterium polysaccharolyticum, Thermoanaerobacterium zeae, Thermoanaerobacterium xylanolyticum, Thermoanaerobacterium saccharolyticum, Thermoanaerobium brockii, Thermoanaerobacterium thermosaccharolyticum, Thermoanaerobacter thermohydrosulfuricus, Thermoanaerobacter ethanolicus, Thermoanaerobacter brockii, variants thereof, and progeny thereof.

[0254] In certain embodiments, the present invention relates to microorganisms of the genera Geobacillus, Saccharococcus, Paenibacillus, Bacillus, and Anoxybacillus, including, but not limited to, species selected from the group consisting of: Geobacillus thermoglucosidasius, Geobacillus stearothermophilus, Saccharococcus caldoxylosilyticus, Saccharoccus thermophilus, Paenibacillus campinasensis, Bacillus flavothermus, Anoxybacillus kamchatkensis, Anoxybacillus gonensis, variants thereof, and progeny thereof.

[0255] In certain embodiments, the present invention relates to mesophilic bacteria selected from the group consisting of Saccharophagus degradans; Flavobacterium johnsoniae; Fibrobacter succinogenes; Clostridium hungatei; Clostridium phytofermentans; Clostridium cellulolyticum; Clostridium aldrichii; Clostridium termitididis; Acetivibrio cellulolyticus; Acetivibrio ethanolgignens; Acetivibrio multivorans; Bacteroides cellulosolvens; and Alkalibacter saccharofomentans, variants thereof and progeny thereof.

[0256] Organism Development Via the Native Cellulolytic Strategy

[0257] One approach to organism development for CBP begins with organisms that naturally utilize cellulose, hemicellulose and/or other biomass components, which are then genetically engineered to enhance product yield and tolerance. For example, Clostridium thermocellum is a thermophilic bacterium that has among the highest rates of cellulose utilization reported. Other organisms of interest are xylose-utilizing thermophiles such as Thermoanaerobacterium saccharolyticum and Thermoanaerobacterium thermosaccharolyticum. Organic acid production may be responsible for the low concentrations of produced ethanol generally associated with these organisms. Thus, one objective is to eliminate production of acetic and lactic acid in these organisms via metabolic engineering. Substantial efforts have been devoted to developing gene transfer systems for the above-described target organisms and multiple C. thermocellum isolates from nature have been characterized. See McLaughlin et al. (2002) Environ. Sci. Technol. 36:2122. Metabolic engineering of thermophilic, saccharolytic bacteria is an active area of interest, and knockout of lactate dehydrogenase in T saccharolyticum has recently been reported. See Desai et al. (2004) Appl. Microbiol. Biotechnol. 65:600. Knockout of acetate kinase and phosphotransacetylase in this organism is also possible.

[0258] Organism Development Via the Recombinant Cellulolytic Strategy

[0259] An alternative approach to organism development for CBP involves conferring the ability to grow on lignocellulosic materials to microorganisms that naturally have high product yield and tolerance via expression of a heterologous cellulasic system and perhaps other features. For example, Saccharomyces cerevisiae has been engineered to express over two dozen different saccharolytic enzymes. See Lynd et al. (2002) Microbiol. Mol. Biol. Rev. 66:506.

[0260] Whereas cellulosic hydrolysis has been approached in the literature primarily in the context of an enzymatically-oriented intellectual paradigm, the CBP processing strategy requires that cellulosic hydrolysis be viewed in terms of a microbial paradigm. This microbial paradigm naturally leads to an emphasis on different fundamental issues, organisms, cellulasic systems, and applied milestones compared to those of the enzymatic paradigm. In this context, C. thermocellum has been a model organism because of its high growth rate on cellulose together with its potential utility for CBP.

[0261] In certain embodiments, organisms useful in the present invention may be applicable to the process known as simultaneous saccharification and fermentation (SSF), which is intended to include the use of said microorganisms and/or one or more recombinant hosts (or extracts thereof, including purified or unpurified extracts) for the contemporaneous degradation or depolymerization of a complex sugar (i.e., cellulosic biomass) and bioconversion of that sugar residue into ethanol by fermentation.

[0262] Ethanol Production

[0263] According to the present invention, a recombinant microorganism can be used to produce ethanol from biomass, which is referred to herein as lignocellulosic material, lignocellulosic substrate, or cellulosic biomass. Methods of producing ethanol can be accomplished, for example, by contacting the biomass with a recombinant microorganism as described herein, and as described in commonly owned U.S. Patent Application Publication No. 2011/0189744 A1, U.S. Patent Application Publication No. 2011/0312054 A1, U.S. Patent Application Publication No. 2012/0003701, International Publication No. WO 2010/060056, International Publication No. WO 2010/075529, International Publication No. WO 2010/056805, International Publication No. WO 2009/138877, and International Publication No. WO 2010/060056, the contents of each are incorporated by reference herein in their entireties.

[0264] Numerous cellulosic substrates can be used in accordance with the present invention. Substrates for cellulose activity assays can be divided into two categories, soluble and insoluble, based on their solubility in water. Soluble substrates include cellodextrins or derivatives, carboxymethyl cellulose (CMC), or hydroxyethyl cellulose (HEC). Insoluble substrates include crystalline cellulose, microcrystalline cellulose (Avicel), amorphous cellulose, such as phosphoric acid swollen cellulose (PASC), dyed or fluorescent cellulose, and pretreated lignocellulosic biomass. These substrates are generally highly ordered cellulosic material and thus only sparingly soluble.

[0265] It will be appreciated that suitable lignocellulosic material may be any feedstock that contains soluble and/or insoluble cellulose, where the insoluble cellulose may be in a crystalline or non-crystalline form. In various embodiments, the lignocellulosic biomass comprises, for example, wood, corn, corn stover, sawdust, bark, leaves, agricultural and forestry residues, grasses such as switchgrass, ruminant digestion products, municipal wastes, paper mill effluent, newspaper, cardboard or combinations thereof.

[0266] In some embodiments, the invention is directed to a method for hydrolyzing a cellulosic substrate, for example a cellulosic substrate as described above, by contacting the cellulosic substrate with a recombinant microorganism of the invention. In some embodiments, the invention is directed to a method for hydrolyzing a cellulosic substrate, for example a cellulosic substrate as described above, by contacting the cellulosic substrate with a co-culture comprising yeast cells expressing heterologous cellulases.

[0267] In some embodiments, the invention is directed to a method for fermenting cellulose. Such methods can be accomplished, for example, by culturing a host cell or co-culture in a medium that contains insoluble cellulose to allow saccharification and fermentation of the cellulose.

[0268] The production of ethanol can, according to the present invention, be performed at temperatures of at least about 30° C., about 31° C., about 32° C., about 33° C., about 34° C., about 35° C., about 36° C., about 37° C., about 38° C., about 39° C., about 40° C., about 41° C., about 42° C., about 43° C., about 44° C., about 45° C., about 46° C., about 47° C., about 48° C., about 49° C., or about 50° C. In some embodiments of the present invention the thermotolerant host cell can produce ethanol from cellulose at temperatures above about 30° C., about 31° C., about 32° C., about 33° C., about 34° C., about 35° C., about 36° C., about 37° C., about 38° C., about 39° C., about 40° C., about 41° C., about 42° C., or about 43° C., or about 44° C., or about 45° C., or about 50° C. In some embodiments of the present invention, the thermotolerant host cell can produce ethanol from cellulose at temperatures from about 30° C. to 60° C., about 30° C. to 55° C., about 30° C. to 50° C., about 40° C. to 60° C., about 40° C. to 55° C. or about 40° C. to 50° C.

[0269] The production of ethanol (or other products and co-products) can, according to the present invention, further be performed according to the “Brazil process.” Under the “Brazil process,” non-sterilized cane juice and/or molasses is fermented at a high inoculum to achieve fast fermentations. During the fermentation process, the yeast is repeatedly recycled over the 200+ day crop season by centrifuging the cells and washing them in sulphuric acid to decrease contamination and break up flocculation of cells. Industrial strains isolated from cane ethanol fermentations in Brazil have been shown to have characteristics that allow them to survive the acid washing and fermentation conditions better than typical lab yeast or other industrial yeast isolates. One commonly used S. cerevisiae strain in Brazil, PE-2, is a wild isolate from cane ethanol fermentation. The PE-2 strain has been described by Argueso et al., 2009, which is incorporated by reference herein in its entirety. Argueso et al., “Genome structure of a Saccharomyces cerevisiae strain widely used in bioethanol production,” Genome Res. 19(12):2258-70 (2009); see also JAY291 genome, Saccharomyces Genome Database (SGD), yeastgenome.org/. In the Brazil cane ethanol fermentations, PE-2 and other industrial strains produce an average of 4.5 g/L glycerol. In some embodiments, the PE-2 strain, or a modified version thereof, is used as the host organism. In certain embodiments, ethanol is produced through the fermentation of a host cell according to the Brazil process. In some embodiments, the recombinant microorganism is used to ferment a carbohydrate source wherein the microorganisms are reused after one or more fermentations, and wherein the microorganisms are washed with an acid following each fermentation. In some embodiments, the acid has a pH of between 2.0 and 2.2. In certain embodiments, the acid is sulphuric acid.

[0270] In some embodiments, methods of producing ethanol can comprise contacting a cellulosic substrate with a recombinant microorganism or co-culture of the invention and additionally contacting the cellulosic substrate with externally produced cellulase enzymes. Exemplary externally produced cellulase enzymes are commercially available and are known to those of skill in the art.

[0271] In some embodiments, the methods comprise producing ethanol at a particular rate. For example, in some embodiments, ethanol is produced at a rate of at least about 0.1 mg per hour per liter, at least about 0.25 mg per hour per liter, at least about 0.5 mg per hour per liter, at least about 0.75 mg per hour per liter, at least about 1.0 mg per hour per liter, at least about 2.0 mg per hour per liter, at least about 5.0 mg per hour per liter, at least about 10 mg per hour per liter, at least about 15 mg per hour per liter, at least about 20.0 mg per hour per liter, at least about 25 mg per hour per liter, at least about 30 mg per hour per liter, at least about 50 mg per hour per liter, at least about 100 mg per hour per liter, at least about 200 mg per hour per liter, at least about 300 mg per hour per liter, at least about 400 mg per hour per liter, at least about 500 mg per hour per liter, at least about 600 mg per hour per liter, at least about 700 mg per hour per liter, at least about 800 mg per hour per liter, at least about 900 mg per hour per liter, at least about 1 g per hour per liter, at least about 1.5 g per hour per liter, at least about 2 g per hour per liter, at least about 2.5 g per hour per liter, at least about 3 g per hour per liter, at least about 3.5 g per hour per liter, at least about 4 g per hour per liter, at least about 4.5 g per hour per liter, or at least about 5 g per hour per liter.

[0272] In some embodiments, the host cells of the present invention can produce ethanol at a rate of at least about 0.1 mg per hour per liter, at least about 0.25 mg per hour per liter, at least about 0.5 mg per hour per liter, at least about 0.75 mg per hour per liter, at least about 1.0 mg per hour per liter, at least about 2.0 mg per hour per liter, at least about 5.0 mg per hour per liter, at least about 10 mg per hour per liter, at least about 15 mg per hour per liter, at least about 20.0 mg per hour per liter, at least about 25 mg per hour per liter, at least about 30 mg per hour per liter, at least about 50 mg per hour per liter, at least about 100 mg per hour per liter, at least about 200 mg per hour per liter, at least about 300 mg per hour per liter, at least about 400 mg per hour per liter, at least about 500 mg per hour per liter, at least about 600 mg per hour per liter, at least about 700 mg per hour per liter, at least about 800 mg per hour per liter, at least about 900 mg per hour per liter, at least about 1 g per hour per liter, at least about 1.5 g per hour per liter, at least about 2 g per hour per liter, at least about 2.5 g per hour per liter, at least about 3 g per hour per liter, at least about 3.5 g per hour per liter, at least about 4 g per hour per liter, at least about 4.5 g per hour per liter, or at least about 5 g per hour per liter more than a control strain (e.g., a wild-type strain) and grown under the same conditions. In some embodiments, the ethanol can be produced in the absence of any externally added cellulases.

[0273] Ethanol production can be measured using any method known in the art. For example, the quantity of ethanol in fermentation samples can be assessed using HPLC analysis. Many ethanol assay kits are commercially available that use, for example, alcohol oxidase enzyme based assays. Methods of determining ethanol production are within the scope of those skilled in the art from the teachings herein. The U.S. Department of Energy (DOE) provides a method for calculating theoretical ethanol yield. Accordingly, if the weight percentages are known of C6 sugars (i.e., glucan, galactan, mannan), the theoretical yield of ethanol in gallons per dry ton of total C6 polymers can be determined by applying a conversion factor as follows:

(1.11 pounds of C6 sugar/pound of polymeric sugar)×(0.51 pounds of ethanol/pound of sugar)×(2000 pounds of ethanol/ton of C6 polymeric sugar)×(1 gallon of ethanol/6.55 pounds of ethanol)×(1/100%), wherein the factor (1 gallon of ethanol/6.55 pounds of ethanol) is taken as the specific gravity of ethanol at 20° C.

[0274] And if the weight percentages are known of C5 sugars (i.e., xylan, arabinan), the theoretical yield of ethanol in gallons per dry ton of total C5 polymers can be determined by applying a conversion factor as follows:

(1.136 pounds of C5 sugar/pound of C5 polymeric sugar)×(0.51 pounds of ethanol/pound of sugar)×(2000 pounds of ethanol/ton of C5 polymeric sugar)×(1 gallon of ethanol/6.55 pounds of ethanol)×(1/100%), wherein the factor (1 gallon of ethanol/6.55 pounds of ethanol) is taken as the specific gravity of ethanol at 20° C.

[0275] It follows that by adding the theoretical yield of ethanol in gallons per dry ton of the total C6 polymers to the theoretical yield of ethanol in gallons per dry ton of the total C5 polymers gives the total theoretical yield of ethanol in gallons per dry ton of feedstock.

[0276] Applying this analysis, the DOE provides the following examples of theoretical yield of ethanol in gallons per dry ton of feedstock: corn grain, 124.4; corn stover, 113.0; rice straw, 109.9; cotton gin trash, 56.8; forest thinnings, 81.5; hardwood sawdust, 100.8; bagasse, 111.5; and mixed paper, 116.2. It is important to note that these are theoretical yields. The DOE warns that depending on the nature of the feedstock and the process employed, actual yield could be anywhere from 60% to 90% of theoretical, and further states that “achieving high yield may be costly, however, so lower yield processes may often be more cost effective.”

### EXEMPLIFICATION

[0277] The invention now being generally described, it will be more readily understood by reference to the following examples, which are included merely for purposes of illustration of certain aspects and embodiments of the present invention, and are not intended to limit the invention.

### Example 1

[0278] STL1 Overexpression in Wild Type Strain

[0279] An STL1 expression cassette comprising S. cerevisiae STL1 (FIG. 9 and SEQ ID NOs: 139 and 140) was genetically engineered into M2390 (Ethanol Red (new) from LaSaffre (pahc.com/Phibro/Performance-Products/Catalog/23/Ethanol-Red.html)) using the primers listed in Table 6 below. The transformed strain was compared to the non-transformed host strain M2390 during fermentation of laboratory medium YMD-280 (280 g/L maltodextrin, 20 g/L yeast extract, 2 g/L urea, 1 g/L citrate, +/1 5 g/L glycerol) with or without externally supplied glycerol (5 g/L glycerol). YMD-280 medium with or without glycerol was inoculated with M2390 and M2390+STL1 to starting concentration of 0.1 g/L dry cell weight (DCW) and allowed to ferment for 72 hrs. Samples were withdrawn and metabolite concentrations where determined by HPLC. Ethanol concentrations were higher in the strains overexpressing the STL1 gene (FIG. 2A) when compared to the control strain. The increase in ethanol titer was independent of externally supplied glycerol (FIG. 2A). In addition, total glycerol was reduced by approximately 2 g/L in the STL1 expressing strain compared to the control strain, regardless of whether external glycerol was supplied (FIG. 2B).

TABLE 6
Primers to create assembly MA0415.6 (STL1 cassette
integrated into the FCY1 locus)
MA0415.6

| | | | Expected |
|---|---|---|---|
| Fragment | Primers | Template | Size |
| FCY 5′ Flank | X21754/X24389 | M2390 | 2018 bp |
| | | gDNA | |
| TEF2 pro-STL1-ADH3 | X24388/X19513 | pMU3636 | 2709 bp |
| ter | | | |
| ADH1 pro-STL1-PDC1 | X19514/X18955 | pMU3635 | 2950 bp |
| ter | | | |
| FCY 3′ Flank | X19950/X18869 | M2390 | 2159 bp |
| | | gDNA | |

### Example 2

### STL1 Overexpression in Wild Type Strain

[0280] An additional fermentation was performed to determine the effect of STL1 expression in the wild type M2390 background using YMD-2300 medium (300 g/L maltodextrin, 20 g/L yeast extract, 2 g/L urea, 1 g/L citrate, 5 g/L glycerol). M2390 and M5975 (M2390+STL1) were inoculated into 50 mL of YMD-300 to a starting concentration of 0.1 g/L DCW and allowed to ferment for 48 hrs, at which point samples were withdrawn and metabolite concentrations where determined by HPLC. M5975 consumed significantly more sugar and reached a significantly higher titer of ethanol than the M2390 control strain (FIGS. 3A and 3B). Relative to M2390, expression of STL1 in M5975 resulted in extracellular glycerol concentrations that were reduced by 3.3 g/L (FIG. 3C).

### Example 3

### Overexpression of STL1 in Wild Type Yeast Results in Higher Intracellular Glycerol Concentrations

[0281] An intracellular assay was used to determine whether expression of STL1 resulted in higher intracellular glycerol concentrations. Strain M5975 overexpresses STL1 due to engineering of STL1 into the FCY1 site on the S. cerevisiae chromosome (the same cassette as described above in Example 1). Both M2390 and M5975 were grown overnight in YPD medium (20 g/L peptone, 10 g/L yeast extract, 20 g/g dextrose), after which cells were harvested and quenched. See Gonzalez, et al., “A Rapid and Reliable Method for Metabolite Extraction in Yeast using Boiling Buffered Ethanol,” Yeast 13:1347-56 (1997). Briefly, cells were grown overnight in YPD and the culture was diluted to an OD₆₆₀ of 1.9. Ten milliliters of ice cold methanol were added to 10 mL of the OD₆₆₀ 1.9 culture. The suspension was centrifuged at 5,000 RPMs for 5 min, after which the supernatant was discarded. To each pellet, 5 mL of boiling 75% ethanol/250 mM HEPES pH 7.5 was added and allowed to cool on ice for ten minutes. These samples were dehydrated in a speed vac overnight and reconstituted in 500 μL of DI H₂O. This suspension was centrifuged and the supernatant was used to assay for glycerol concentration using the Free Glycerol Reagent (Sigma catalog #F6428).

[0282] The data of FIG. 4 demonstrates that M5975 has increased intracellular glycerol concentration compared to the parental control, M2390.

### Example 4

### STL1 Overexpression in Wild Type Strain Reaches a Higher Titer on Corn Mash

[0283] Several strains were constructed that contained modifications of STL1 overexpression levels in M2390 and fermentation performance was evaluated on 33% solids corn mash. Strains M2390 and M5975 are described above. Strain M6173 was created using the primers listed in Table 47 below and contains the same promoters and terminators used in MA0415.6 Example 1 above; however, the assembly was integrated in the STL1 locus. See FIG. 10.

[0284] Both strains containing upregulation of STL1 (M5975 and M6173) made ˜2.5 g/L more ethanol than the parental control (M2390) with a concomitant reduction in glycerol production (FIGS. 5A and 5B). These results indicate that glycerol uptake through STL1 overexpression can reduce overall glycerol production without sacrificing performance in industrially relevant conditions, e.g., fermentation on corn mash.

TABLE 7
Primers to create assembly MA0998 (STL1 cassette
integrated into the STL1 locus)
STL1::4copies STL1

| | | | Expected | |
|---|---|---|---|---|
| Fragment | Primers | Template | Size | |
| 5′ Flank | X24000/X24109 | M2390 gDNA | ~2 | kb |
| tef2pro | X24108/X19513 | pMU3636 | 2709 | bp |
| adh1pro | X19514/X24111 | pMU3635 | 2950 | bp |
| 3′ Flank | X24110/X24003 | M2390 gDNA | ~2 | kb |

### Example 5

### STL1 Overexpression in S. cerevisiae Strains Engineered to Secrete a Glucoamylase

[0285] An S. fibuligera glucoamylase expression cassette was engineered into S. cerevisiae strain M2390 (described in U.S. patent application Ser. No. 13/696,207 and U.S. patent application Ser. No. 13/701,652, both of which are incorporated by reference herein in their entireties) to create strain M4080. The S. fibuligera glucoamylase nucleotide and amino acid sequences correspond to SEQ ID NO:131 and SEQ ID NO:132, respectively. M4080 was subsequently engineered with the STL1 expression cassette of Example 1 above to create strain M6308. Strains M2390, M4080, and M6308 were each inoculated into 50 mL of 33% solids industrial corn mash and allowed to ferment for 68 hrs prior to sampling and HPLC-based determination of metabolite concentrations. Glucoamylase (Sprizyme ultra, Novozymes) was added to the control (strain M2390) at 0.6 AGU/gTS and at 0.3 AGU/gTS for both M4080 and M6308. The results shown in FIG. 6A demonstrate that expression of STL1 in M6308 enabled the strain to reach a higher titer of ethanol than the wild type yeast (strain M2390) using 50% less externally added glucoamylase. A 0.9 g/L reduction in glycerol was also observed in strain M6308 compared to the control strain (FIG. 6B).

### Example 6

### STL1 Overexpression in S. cerevisiae Strains Engineered to Produce Formate as an Alternate Electron Sink

[0286] Strain M3465 was previously engineered to produce formate as an alternative electron sink and the creation of strain M3465 is described in International Publication No. WO 2012/138942, which is incorporated by reference herein in its entirety. M3465 was subsequently engineered with the STL1 expression cassette of Example 1 above to create strain M6211. Strains M2390 (control strain), M3465, and M6211 were each inoculated into 50 mL of 33% solids industrial corn mash and allowed to ferment for 72 hrs prior to sampling and HPLC-based determination of metabolite concentrations. The results shown in FIG. 7A demonstrate that the expression of STL1 in M6211 enabled the strain to reach a higher titer of ethanol production than the wild type yeast strain M2390 and strain M3465. A 2.3 g/L reduction in glycerol production was also observed when compared to the parent strain, M3465. (FIG. 7B).

### Example 7

### STL1 Overexpression in S. cerevisiae Strains Engineered to Produce Formate as an Alternate Electron Sink and Secrete a Heterologous Glucoamylase

[0287] Strain M3465 (described above) was further engineered with the glucoamylase expression cassette of Example 5 above to create strain M4361. Strain M4361 was subsequently engineered with the STL1 expression cassette of Example 4 above to create strain M6307. Strains M2390, M4361, and M6307 were each inoculated into 50 mL of 33% solids industrial corn mash and allowed to ferment for 68 hrs prior to sampling and HPLC-based determination of metabolite concentrations. The results shown in FIG. 8A demonstrate that the expression of STL1 in M6307 enabled the strain to reach a higher titer of ethanol production than the wild type yeast (M2390) and strain M4361, which produces formate as an alternative electron sink and expresses an S. fibuligera glucoamylase. A 3.7 g/L reduction in glycerol production relative to M2390 was also observed for strain M6307 (FIG. 8B).

### Example 8

### Creation of S. cerevisiae PE-2 Strains that Overexpress STL1

[0288] As described above, industrial strains isolated from cane ethanol fermentations in Brazil have been shown to have characteristics that allow them to survive acid washing and fermentation conditions better than typical lab yeast or other industrial yeast isolates. The most commonly used S. cerevisiae strain currently in Brazil, PE-2, is a wild isolate from cane ethanol fermentation. PE-2 and other industrial used strains, produce an average of 4.5 g/L glycerol in the Brazil process. This glycerol passes through the system unused. The Brazil industrial isolate PE-2 was engineered to overexpress the glycerol transporter STL1. One of the isolated Brazilian fuel ethanol strains, BG-1, was found to have additional copies of the STL1 gene located on a translocated region from Saccharomyces paradoxus. See Della-Bianca, et al., “What do we know about the yeast strains from the Brazilian fuel ethanol industry?,” Appl. Microbiol. Biotechnol. 97(3):979-91 (2013), which is incorporated by reference herein in its entirety.

[0289] The genetic modification techniques utilized to develop STL1 overexpressing strains rely on direct integration of the STL1 cassette onto both chromosomes in the diploid yeast M7101 (see FIG. 15), a colony isolate of PE-2. The directed integration approach creates transgenic strains with integration events that are stable and easy to characterize.

[0290] The modified S. cerevisiae strains described herein contain four additional copies of the native S. cerevisiae gene STL1 (M7772; ScSTL1), or heterologous STL1 genes from Saccharomyces paradoxus (M9725; SpSTL1) or Pichia sorbitophila (M9208; PsSTL1) engineered into the PE-2 strain background. See Table 8. Information regarding the genes, donors, and sources are summarized in Table 8. Detailed information regarding the genetic description such as gene copy number is provided in Table 9. The genetic constructs are described in Table 10, and Table 11 describes plasmids used as DNA templates and for transformation purposes. A strain tree depicting the final strains, M7772, M9208 and M9725, is provided in FIG. 13.

TABLE 8
STL1 genes used in S. cerevisiae
PE-2 STL1 overexpression strains.

| | | | Strain |
|---|---|---|---|
| Gene | Donor | Source | generated |
| STL1 | Saccharomyces cerevisiae | S. cerevisiae M2390 | M7772 |
| STL1 | Pichia sorbitophila | Synthesized gene, codon | M9208 |
| | | optimized | |
| STL1 | Saccharomyces | Synthesized gene, codon | M9725 |
| | paradoxus | optimized | |

TABLE 9
STL1 assemblies in S. cerevisiae PE-2 strain M7101.

| Target | | | |
|---|---|---|---|
| Locus | Locus Modification | Cassette ID | Cassette Description |
| FCY1 | Replaced with | MA415.6 | 4 copies of Sc STL1 |
| | expression cassette | | |
| FCY1 | Replaced with | MA1356 | 4 copies of Ps STL1 |
| | expression cassette | | |
| FCY1 | Replaces with | MAP33 | 4 copies of Sp STL1 |
| | expression cassette | | |

[0291] The STL1 genes of MA415.6, MA1356 and MAP33 (Table 9), were amplified from the templates in Table 10 and gel purified prior to transformation into M7101. The recombinant STL1 gene copies in MA415.6, MA1356 and MAP33 are under the control of native S. cerevisiae promoters TEF2 and ADH1, as shown in Table 10, which are oriented on opposing DNA strands of the chromosome to minimize the possibility of recombination between the recombinant STL1 genes at a given locus. These PCR-amplified products were engineered with overlapping ends having homology to DNA flanking the 5′ and 3′ region of the FCY1 locus to promote homologous recombination in vivo at the FCY1 locus of S. cerevisiae. A 2-micron plasmid, pMU228, (FIG. 14) with a hygromycin resistance marker (hph) was co-transformed with the PCR products to enable selection against untransformed cells. The pMU228 plasmid contains the hph gene which confers resistance to hygromycin. This vector can be used for co-transformation with PCR products during the construction of strains. This vector is capable of replicating in both yeast (2 μm ori) and E. coli (PMB1 ori). This vector also contains the bla gene for ampicillin resistance in E. coli and the S. cerevisiae URA3 gene for selection in ura auxotrophs. Without antibiotic selection in yeast, the plasmid is typically lost in two plate passages. Loss of this co-transformation plasmid is confirmed by screening for hygromycin sensitivity.

[0292] The transformed cells were first cultivated overnight in YPDS (20 g/L yeast extract, 10 g g/L peptone, 20 g/L dextrose, and 90 g/L sorbitol)+hygromycin (300 μg/ml) broth and then plated on a medium containing 5-FC to select against [functional?] FCY1 and simultaneously assemble and integrate the STL1 cassettes into the chromosome, knocking out the FCY1 gene. FIG. 15 demonstrates how the STL1 expression cassettes were integrated into the FCY1 loci of strain M7101. The 4 DNA fragments: (p1) FCY1 5′ flank, (p2) the STL1 cassette with the TEF2 promoter and ADH3 terminator, (p3) the STL1 cassette with the ADH1 promoter and PDC1 terminator, and (p4) the FCY1 3′ flank, were engineered with overlapping ends to promote homologous recombination in vivo. Counter-selection against FCY1 using 5-fluorocytosine (5-FC) selects for integration of the STL1 expression cassette. See Hartzog, P. E., et al., “Cytosine deaminase MX cassettes as positive/negative selectable markers in S. cerevisiae,” Yeast 22:789-798 (2005). Because removal of both copies of FCY1 is necessary for resistance to 5-FC, the expression cassette was found to be integrated at both chromosomes.

TABLE 10
Gene cassettes for STL1 overexpression at the FCY1 locus.

| | | | |
|---|---|---|---|
| Fragment | Primers | Template | Expected size |

MA415.6 (Δfcy1::ScSTL1)

| | | | |
|---|---|---|---|
| FCY 5′ Flank | X21754/X19552 | M2390 gDNA | 2018 bp |
| TEF2 pro-STL1-ADH3 ter | X19551/X19513 | pMU3636 | 2709 |
| PDC1 ter-STL1-ADH1 pro | X19514/X18955 | pMU3635 | 2950 |
| FCY 3′ Flank | X19950/X18869 | M2390 gDNA | 2159 |

MA1356 (Δfcy1::PsSTL1)

| | | | |
|---|---|---|---|
| FCY1 5′ flank (JAY291) | X26376/X26801 | M7101 | 1558 bp |
| TEF2p-STL1 | X26802/X26792 | pMU3432 | 2812 |
| (P. sorbitophila)-ADH3t | | | |
| PDC1t-STL1 | X26793/X23413 | YCL482-3 | 3036 |
| (P. sorbitophila)-ADH1p | | | |
| FCY1 3′ flank (JAY291) | X26822/X26379 | M7101 | 1268 |

MAP33(Δfcy1::SpSTL1)

| | | | |
|---|---|---|---|
| FCY1 5′ flank (JAY291) | X26376/X26377 | M7101 | 1517 bp |
| (building) Tef2p-STL1 | X26802/X26792 | M9441 | 2788 |
| (S. paradoxus)-ADH3t | | | |
| (building) ADH1p-STL1 | X26793/X23413 | M9442 | 3030 |
| (S. paradoxus)-PDC1t | | | |
| FCY1 3′ flank (JAY291) | X26378/X26379 | M7101 | 1226 |

TABLE 11
Summary of plasmids used in the construction of strain M7772.

| Plasmid | Description |
|---|---|
| pMU3635 | ADH1 promoter-STL1-PDC1 terminator in yeast 2micron |
| | KanMX plasmid; used as template for STL1 with new |
| | promoter/terminator construct |
| pMU3636 | TEF2 promoter-STL1-ADH3 terminator in yeast 2micron |
| | KanMX plasmid; used as template for STL1 with new |
| | promoter/terminator construct |
| pMU228 | HPH-MX, positive and negative selection at all |
| | engineered loci; Used as a co-transformation plasmid |

[0293] Genetic confirmation of the cassette integration was achieved through PCR genotyping of the FCY1 locus using chromosomal DNA isolated from individual transformants. To confirm that the MA451.6, MA1356, and MAP33 cassettes were inserted at the FCY1 site of strain M7101, PCR products were amplified from genomic DNA that crossed all junctions of the inserted DNA pieces. These products were run on an agarose gel, which showed that the cassettes had integrated correctly and that the insertions removed the native FCY1 gene. The deletion of FCY1 allows for the easy and unique detection of the engineered strains in the lab or industrial environment due to the resistance of the ΔFCY1 strains to 5-FC as well as their inability to grow on minimal media with cytosine as the sole nitrogen source. FCY1 functions in the pyrimidine salvage pathway for DNA synthesis and is required for utilization of cytosine as a nitrogen source. S. cerevisiae strains that have FCY1 knocked out (fcy1Δ) therefore cannot grow on media where cytosine is the sole nitrogen source.

[0294] The strains with the correct genotype were passaged several times in the absence of antibiotic selection to ensure that plasmid pMU228 (FIG. 14; Table 11) was cured from the strain. Loss of pMU228 was confirmed by lack of growth when cells were plated on agar plates containing 300 μg/ml hygromycin. Strains M7772, M9208 and M9725 were confirmed to be hygromycin sensitive.

### Example 9

### Fermentation of S. cerevisiae PE-2 Strains Overexpressing STL1

[0295] Minimal Media Fermentations with PE-2 STL1 Strains

[0296] STL1 overexpression strains were initially screened in anaerobic fermentations on minimal media. Strains were propagated aerobically on YPD20 broth (yeast extract 20 g/L, peptone 10 g/L, and 20 g/L dextrose) at 35° C. with shaking at 225 rpm. Cultures of 100 g/L glucose Verduyn media, as described in Verduyn, et al., “Effect of benzoic acid on metabolic fluxes in yeasts: A continuous-culture study on the regulation of respiration and alcoholic fermentation,” Yeast 8: 501-17 (1992), which is incorporated by reference herein in its entirety, at pH 4.8 were inoculated with 0.5 g/L cells and incubated with shaking at 225 rpm at 35° C. for 48 hrs, and the concentration of glycerol and ethanol were determined by HPLC. M7772, which comprises S. cerevisiae STL1 (ScSTL1), showed a 15% decrease in glycerol in the media as well as about a 2% increase in ethanol production compared to the wild-type parental strain, M7101 (FIG. 16A). The expression of the heterologous STL1 genes from P. sorbitophila and S. paradoxus showed similar results to the S. cerevisiae STL1 overexpression. The P. sorbitophila STL1 expressing strain, M9208, had a 23% reduction in glycerol and a 4% increase in ethanol titer compared to the wild-type PE-2 strain, M7101 (FIG. 16A). The S. paradoxus STL1 expressing strain, M9725, had a 12% reduction in glycerol and a 4% increase in ethanol titer compared to the wild-type PE-2 strain, M7101 (FIG. 16A).

### Acid Treatment-Brazilian Cane Ethanol Fermentations

[0297] The wild-type parental strain, M7101 (PE-2 isolate), and the S. cerevisiae STL1 overexpression strain, M7772, were compared for their fermentation performance in a lab-scale batch must fermentation and acid wash test. Strains were propagated overnight aerobically in YPD50 medium (yeast extract 20 g/L, peptone 10 g/L, and 50 g/L dextrose) at 35° C. with shaking at 225 rpm. Strains were then inoculated at 10% w/w into an initial fermentation on a must and incubated for 6 hours at 35° C. Must is a mixture of cane syrup and cane molasses at approximately 160 g/L total reducing sugars (TRS) (70:30 mixture based on TRS). The cells were then isolated by centrifugation, stored overnight at 4° C. and then washed with sulphuric acid at pH2.0-2.2 for 30 minutes at room temperature. A second fermentation on must was carried out on the acid washed cells at 35° C. Fermentations were sampled at 6 hours and ethanol and glycerol levels were determined using HPLC as described above. The engineered yeast overexpressing S. cerevisiae STL1, strain M7772, showed a 4.7% increase in ethanol and a 20% reduction in glycerol compared to the parental strain M7101 (FIG. 16B).

[0298] We then further tested the S. cerevisiae STL1 strain (M7772) in a scaled down version of the Brazil process that included feeding of the must and acid recycle to assess how glycerol uptake would affect the cells under more process relevant conditions. The wild-type parental strain, M7101 (PE-2 isolate), and the S. cerevisiae STL1 overexpression strain, M7772, were compared for their fermentation performance in a lab-scale fed-batch must fermentation. The strains were taken from glycerol stocks and plated to YPD30 (yeast extract 20 g/L, peptone 10 g/L, and 30 g/L dextrose) plates for 24 hours at 30° C. The strains were then transferred to 40 mL of liquid YPS40 (yeast extract 20 g/L, peptone 10 g/L, and 40 g/L sucrose) medium with an additional 75 g/L molasses added. This step occurred at 30° C. in a 250 mL shake flasks under 175 RPM of agitation. After 24 hours, an additional 40 mL of YPS40 media was added and the process was continued for an additional 12 hours. The cells were then pelleted in 50 mL conical tubes and stored overnight at 4° C. The cell pellets were then reduced to 5 g and 9 mL of water was then added. The pH was then reduced to between 2.0 and 2.2 using 72% sulfuric acid. The reactors were allowed to sit at room temperature for 40 minutes after which they were placed in an incubator at 32° C. and shaken at 250 RPM. 28 g of must was then added to a final concentration of 160 g/L total reducing sugars (“TRS”) over 4.5 hours. The fermentation was allowed to continue incubating with shaking for an additional 3-4 hours for a total fermentation time of 7.5-8.5 hours. The reactors were then centrifuged, the supernatant was decanted off, and the supernatant and cell pellets were stored overnight at 4° C. A sample of supernatant was run on HPLC (H and N column) for compositional analysis. The process was then repeated the next day with the only difference being instead of adding 9 mL of water, 2 mL of the supernatant from the previous run was added as well as 7 mL of water. This process was repeated for a total of 14 fermentations and acid treatments.

[0299] Results for runs 4 through 14 (F4-F14) are shown in FIG. 17. The S. cerevisiae STL1 engineered strain, M7772, shows an average of a 1% increase in ethanol titer over the wild-type M7101 over these 10 fermentations and an average 14% decrease in glycerol from the fermentation media compared to M7101 (FIGS. 17A and 17B). In addition, the cell mass accumulation was measured in the fermentations as well as the viability of these cells after the acid washing. Cell mass accumulation from each run was measured as the difference between the started wet weight (5 g) and the final wet pellet weight in each of the reactors. Viability of the cell population was measured post-acid treatment using a Cellometer that stains for live and dead cells. M7772 showed similar biomass accumulation as wild-type M7101 (FIG. 17D) and similar viability (within 4%) after acid treatment as M7101 (FIG. 17C). This data suggests that glycerol uptake by STL1 leads to an increase in ethanol yield in the Brazil cane ethanol fermentations, and these cells are able to withstand acid treatment and multiple rounds of cell recycle while maintaining this yield improvement.

### Example 10

### Production of Isopropanol

[0300] Various recombinant Saccharomyces cerevisiae strains have been made using strain M2390 as the (direct or indirect) parental strain to increase acetone and ultimately isopropanol production. Table 12 provides the genotype of the various strains tested.

TABLE 12
Genotype of the yeast strains used in this example. Strains
M282258, M28444, M28452, M28255, M28256, M28257, M28258,
M28444, M28448, M28452, and M28456 were also modified to
express a heterologous phosphotransacetylase (PTA having
the amino acid sequence of SEQ ID NO: 232) which was characterized
as being inactive (non-functional). Strains T12094-1, T12094-2
and T12094-3 do express a phosphotransacetylase (PTA having
the amino acid sequence of SEQ ID NO: 232) which was characterized
as active and functional.

| Name | Gene(s) overexpressed |
|---|---|
| M2390 | None - this is the wild-type parental strain |
| M27909 | 1x ERG10 |
| | 1x CFTA/B |
| | 1x ADC |
| M28079 | 3x ERG10 |
| | 3x CFTA/B |
| | 3x ADC |
| M28255 | 3x ERG10 |
| | 3x CFTA/B |
| | 3x ADC |
| | 1x PHK |
| M28257 | 3x ERG10 |
| | 3x CFTA/B |
| | 3x ADC |
| | 1x PHK |
| | 1x ACK |
| M28258 | 3x ERG10 |
| | 3x CFTA/B |
| | 3x ADC |
| | 1x PHK |
| | 1x ACK |
| M28444 | 3x ERG10 |
| | 3x CFTA/B |
| | 3x ADC |
| | 2x PHK |
| | 1x ACK |
| M28452 | 3x ERG10 |
| | 3x CFTA/B |
| | 3x ADC |
| | 2x PHK |
| | 1x ACK |
| M28714 | 3x ERG10 |
| | 3x CFTA/B |
| | 3x ADC |
| | 2x PHK |
| | 1x ACK |
| | 1x ACS2 |
| M29063 | 3x ERG10 |
| | 3x CFTA/B |
| | 3x ADC |
| | 2x PHK |
| | 1x ACK |
| | 1x Sal ACS |
| M29065 | 3x ERG10 |
| | 3x CFTA/B |
| | 3x ADC |
| | 2x PHK |
| | 1x ACK |
| | 1x Zb ACS |
| M29067 | 3x ERG10 |
| | 3x CFTA/B |
| | 3x ADC |
| | 2x PHK |
| | 1x ACK |
| | 1x A. aceti ACS |
| M28256 | 3x ERG10 |
| | 3x CFTA/B |
| | 3x ADC |
| | 1x PHK |
| M28258 | 3x ERG10 |
| | 3x CFTA/B |
| | 3x ADC |
| | 1x PHK |
| | 1x ACK |
| M28444 | 3x ERG10 |
| | 3x CFTA/B |
| | 3x ADC |
| | 2x PHK |
| | 1x ACK |
| M28448 | 3x ERG10 |
| | 3x CFTA/B |
| | 3x ADC |
| | 1x PHK |
| | 1x ACK |
| M28452 | 3x ERG10 |
| | 3x CFTA/B |
| | 3x ADC |
| | 2x PHK |
| | 1x ACK |
| M28456 | 3x ERG10 |
| | 3x CFTA/B |
| | 3x ADC |
| | 2x PHK |
| | 2x ACK |
| M28833 | 3x ERG10 |
| | 3x CTFA/B |
| | 3x ADC |
| | 1x PHK |
| T12094-1 | 3x ERG10 |
| T12094-2 | 3x CTFA/B |
| T12094-3 | 3x ADC |
| | 2x PHK |
| | 2x ACK |
| | 1x PTA |

ERG10 refers to a gene encoding a thiolase from Saccharomyces cerevisiae having the amino acid sequence of SEQ ID NO: 230. CTFA/B refers to genes encoding a CoA transferase from Alkaliphilus metalliredigens having the amino acid sequences of SEQ ID NO: 234 (CFTA) and SEQ ID NO: 235 (CFTB). ADC refers to a gene encoding an acetoacetate decarboxylase from Paenibacillus polymyxa having the amino acid sequence of SEQ ID NO: 236. PHK refers to a gene encoding a phosphoketolase from Bifidobacterium adoloscentis having the amino acid sequence of SEQ ID NO: 231. ACK refers to a gene encoding an acetate kinase from Bifidobacterium adoloscentis having the amino acid sequence of SEQ ID NO: 233. ACS2 refers to a gene encoding an acetyl-coA synthase from Saccharomyces cerevisiae having the amino acid sequence of SEQ ID NO: 237. Sal L641P ACS refers to a gene encoding an acetyl-coA synthase from Salmonella enterica having the amino acid sequence of SEQ ID NO: 238. Zb ACS refers to a gene encoding an acetyal-coA synthase from Zygosaccharomyces bailii having the amino acid sequence of SEQ ID NO: 239. A. aceti ACS refers to a gene encoding an acetyl-coA synthase from Acetobacter aceti having the amino acid sequence of SEQ ID NO: 240.

[0301] The yeast strains have been submitted to a permissive fermentation. More specifically, a corn mash (32% solids) was inoculated (0.06 g/L) with an overnight culture in a YPD medium of each of the strains tested. The corn mash was also supplemented with an exogenous glucoamylase (0.45 AGU/g of total solids) as well as 130 ppm of urea. The fermentations were conducted in a fermentation volume of 30 g in 60 mL serum bottles. The fermentations were conducted at a temperature of 33° C. for the first 24 h and then at 31° for the remainder of the time of the fermentations. The fermentations lasted 67 hours. The amount of the various metabolites obtained at the end of the fermentation are provided in Table 13.

TABLE 13
Metabolite concentration at the end of the fermentation conducted
with the strains listed in Table 12. IPA: isopropanol.

| Strain | Glucose | Xylose | Arabinose | Net lactate | Net Glycerol | Net acetate | Net ethanol | Net acetone | Net IPA |
|---|---|---|---|---|---|---|---|---|---|
| M2390 | 1.24 | 0.39 | 0.26 | 0.19 | 8.37 | 0.54 | 136.99 | 0.08 | 0.02 |
| M28079 | 1.23 | 0.42 | 0.23 | 0.47 | 12.37 | −0.19 | 132.17 | 0.64 | 0.50 |
| M28452 | 0.25 | 0.46 | 0.21 | 0.41 | 7.63 | 0.14 | 135.58 | 1.14 | 0.53 |
| M28714 | 2.31 | 0.32 | 0.22 | 0.50 | 10.59 | −0.29 | 133.85 | 1.72 | 0.89 |
| M29063 | 1.33 | 0.36 | 0.22 | 0.47 | 10.26 | −0.08 | 131.16 | 1.46 | 0.89 |
| M29065 | 2.41 | 0.33 | 0.14 | 0.50 | 10.75 | −0.35 | 133.14 | 1.76 | 0.97 |
| M29067 | 1.32 | 0.32 | 0.22 | 0.51 | 10.79 | −0.37 | 132.61 | 1.68 | 0.94 |

[0302] One strain from each of the heterologous ACS builds (M29063, M29065, and M29067) was chosen for inclusion in a corn mash experiment to compare to a strain with the S. cerevisiae ACS2 overexpressed (M28714), and to a strain without ACS2 overexpressed (M28452). Each of the four ACS enzymes tested yielded very similar HPLC results with only slight variations (see Table 13). In general, inclusion of ACS increased both IPA and acetone titers by approximately 50% over the parental strain M28452. However, each also led to a significant increase in glycerol with a concomitant decrease in ethanol. Very little to no residual acetate was present within these fermentations suggesting that additional ACS activity was able to keep acetate from accumulating.

[0303] Yeast strains M2390, M27909, M28079, M28256 and M28258 have been submitted to a permissive fermentation. More specifically, an overnight culture in YPD 40 g/l dextrose of the strains was inoculated in a serum bottle comprising 30 mL of YPD 120 g/l dextrose. The fermentations were conducted at 32° C. for 65 hours. At the end of the fermentation, the amounts of different metabolites was determined by HPLC and is presented on FIG. 18.

[0304] Two variations were integrated into strain M28079, one containing PHK (M28256), and the other containing PHK and ACK (M28258). These two various led to an approximately 60% increase in produced acetone in the absence of exogenous acetate (FIG. 18). In addition, glycerol and ethanol titers shifted back to wild type levels (FIG. 18). Similar results were obtained with or without the inclusion of the ACK enzyme (FIG. 18). However, it does appear that inclusion of this gene did reduce glycerol slightly more than builds in which it was absent (FIG. 18).

[0305] Yeast strains M2390, M27909, M28079, M28256, and M28258 have been submitted to permissive fermentations. More specifically, an overnight culture in YPD 40 g/l dextrose of the strains was inoculated in a serum bottle comprising 30 mL of YPD 120 g/l dextrose. The fermentations were conducted at 32° C. for 24 hours (for strains cultured in YPD). At the end of the fermentation, the amounts of different metabolites was determined by HPLC and is presented on FIG. 19.

[0306] Yeast strains M2390, M27909, M28079, M28258, M28444, M28448, M28452 and M28456 have been submitted to permissive fermentations. More specifically, an overnight culture in YPD 40 g/l dextrose of the strains was inoculated in a serum bottle comprising 30 mL of YPD 120 g/l dextrose. The fermentations were conducted at 32° C. for 40 hours. At the end of the fermentation, the amounts of different metabolites was determined by HPLC and is presented on FIG. 20.

[0307] In order to increase the flux through the glucose to acetone pathway additional copies of some enzymes were introduced either alone or in combination, M28444, M28448, M28452 and M28456. Fermentation results indicated that increasing copy number of such enzymes did not increase acetone production in YPD medium (FIG. 20). However, increasing phosphoketolase activity did lead to a decrease in glycerol and an increase in acetate production (FIG. 20).

[0308] Yeast strains M2390, M27909, M28079, M28258, M28444 and M28452 have been submitted to permissive fermentations. More specifically, an overnight culture in YPD 40 g/l dextrose of the strains was inoculated in a serum bottle comprising 30 mL of a corn mash (32% total solids) supplemented with a 100% of an exogenous glucoamylase (0.45 AGU/gTS) and urea (130 or 800 ppm). The fermentations were conducted at 33° C. for the first 24 hours and at 31° C. for the rest of the fermentation (24-68 hours). At the end of the fermentation, the amounts of different metabolites was determined by HPLC and is presented on FIG. 21.

[0309] Increasing the copy number of the acetyl-CoA to acetone portion of the pathway from 1 copy to 3 copies (M28079 compared to M27909) increased acetone production by ˜50% (FIG. 21). The addition of PHK and ACK in several different copy numbers (M28258, M28444, and M28452) resulted in further increase of acetone production by another ˜33% compared to the strains without those enzymes (FIG. 21). While the copy number of PHK and ACK did not have much impact on acetone production, increasing PHK to 2 copies (M28444 and M28452) did lead to decreased glycerol production and increased ethanol production (FIG. 21).

[0310] Yeast strains M2390, M28833, T12094-1, T12094-2, and T12094-3 have been submitted to permissive fermentations. More specifically, an overnight culture in YPD 40 g/l dextrose of the strains was inoculated in a serum bottle comprising 30 mL of YPD 120 g/l dextrose. The fermentations were conducted at 32° C. for 40 hours and in duplicate. At the end of the fermentation, the amounts of different metabolites was determined by HPLC and is presented in Table 14.

[0311] The addition of enzymes that convert acetyl-CoA to acetone, in a “lower pathway” (M28079) to the wild type strain (M2390) led to some acetone and IPA production and a decrease in acetate production. However, this strain with a partial pathway also led to lower ethanol production than wild type strain and much higher glycerol production. When the PHK was added in addition to these lower pathway enzymes (M28333), acetone production was increase by ˜20%, and ethanol and glycerol were restored to near wild-type levels. Acetate production was increased over M28079. When PTA and ACK were added to M28333 (T12094-1, T12094-2, and T12094-3), the highest levels of acetone were produced (˜38% over M28079), along with the highest ethanol titers, and lowest glycerol titers. Acetate production was higher than M28079, but lower than M28833 which did not include the ACK and PTA.

TABLE 14
Metabolite concentration at the end of the fermentation conducted with some of the strains listed
in Table 12. IPA: isopropanol. The results of two distinct fermentations are presented.

| | | | | Lactic | | Acetic | | | | Net | Net | Net | Net |
|---|---|---|---|---|---|---|---|---|---|---|---|---|---|
| Strain | Glucose | Xylose | Arabinose | Acid | Glycerol | Acid | Ethanol | Acetone | IPA | Glycerol | Acetate | Ethanol | A [symbol] |
| M2390 | 0.06 | 0.11 | 0.40 | 0.40 | 5.69 | 1.75 | 52.03 | 0.16 | 0.06 | 5.69 | 1.75 | 52.03 | 0 [symbol] |
| M28079 | 0.05 | 0.10 | 0.35 | 0.49 | 7.02 | 1.27 | 50.95 | 0.53 | 0.42 | 7.02 | 1.27 | 50.95 | 0 [symbol] |
| M28833 | 0.08 | 0.10 | 0.33 | 0.50 | 5.35 | 1.58 | 51.54 | 0.63 | 0.42 | 5.35 | 1.58 | 51.54 | 0 [symbol] |
| T12094-1 | 0.07 | 0.14 | 0.31 | 0.51 | 4.99 | 1.41 | 52.30 | 0.69 | 0.45 | 4.99 | 1.41 | 52.30 | 0 [symbol] |
| T12094-2 | 0.09 | 0.13 | 0.32 | 0.50 | 4.50 | 1.46 | 52.54 | 0.72 | 0.44 | 4.50 | 1.46 | 52.54 | 0 [symbol] |
| T12094-3 | 0.07 | 0.13 | 0.31 | 0.49 | 4.39 | 1.43 | 52.68 | 0.73 | 0.41 | 4.39 | 1.43 | 52.68 | 0 [symbol] |
| M2390 | 0.06 | 0.14 | 0.36 | 0.55 | 5.36 | 1.62 | 52.70 | 0.18 | 0.01 | 5.36 | 1.62 | 52.70 | 0 [symbol] |
| M28079 | 0.06 | 0.14 | 0.35 | 0.54 | 6.49 | 1.20 | 51.42 | 0.52 | 0.34 | 6.49 | 1.20 | 51.42 | 0 [symbol] |
| M28833 | 0.07 | 0.12 | 0.33 | 0.55 | 4.78 | 1.60 | 52.71 | 0.59 | 0.37 | 4.78 | 1.60 | 52.71 | 0 [symbol] |
| T12094-1 | 0.11 | 0.13 | 0.32 | 0.57 | 4.28 | 1.30 | 52.77 | 0.69 | 0.36 | 4.28 | 1.30 | 52.77 | 0 [symbol] |
| T12094-2 | 0.07 | 0.12 | 0.32 | 0.56 | 3.91 | 1.33 | 52.90 | 0.73 | 0.36 | 3.91 | 1.33 | 52.90 | 0 [symbol] |
| T12094-3 | 0.09 | 0.13 | 0.33 | 0.56 | 3.92 | 1.32 | 53.39 | 0.80 | 0.36 | 3.92 | 1.32 | 53.39 | 0 [symbol] |

[symbol]

indicates data missing or illegible when filed

### INCORPORATION BY REFERENCE

[0312] All of the references cited herein are hereby incorporated by reference in their entirety.

### EQUIVALENTS

[0313] Those skilled in the art will recognize, or be able to ascertain using no more than routine experimentation, many equivalents to the specific embodiments of the invention described herein. Such equivalents are intended to be encompassed by the following claims.

What is claimed is:

1. A recombinant microorganism comprising:
(a) a plurality of first native and/or heterologous enzymes that function in a first engineered metabolic pathway to convert fructose-6-phosphate to acetyl-CoA and acetate, wherein the plurality of first native and/or heterologous enzymes is activated, upregulated, or overexpressed and comprises:
a phosphoketolase; and
an acetate kinase; and
(b) a plurality of second native and/or heterologous enzymes that function in a second engineered metabolic pathways to convert acetyl-CoA and acetate to acetone and/or isopropanol, wherein the plurality of second native and/or heterologous enzymes is activated, upregulated, or overexpressed and comprises:
a thiolase;
a CoA transferase; and
an acetoacetate decarboxylase.

2. The recombinant microorganism of claim 1, wherein the phosphoketolase:
has the ability to convert D-xylulose 5-phosphate into D-glyceraldehyde 3-phosphate;
has the ability to convert D-fructose 6-phosphate into D-erythrose 4-phosphate;
has single- or dual-specificity;
is heterologous;
is of prokaryotic or eukaryotic origin;
is encoded by a phk1 gene or a phk2 gene;
is derived from Bifidobacterium, Lactobacillus, Leuconostoc, Penicillium, Aspergillus, Oenococcus or Neurospora species;
is derived from Bifidobacterium bifidum, Bifidobacterium gallicum, Bifidobacterium animalis, Bifidobacterium adolescentis, Lactobacillus pentosum, Lactobacillus acidophilus, Lactobacillus casei, Lactobacillus plantarum, Penicillium chrysogenum, Aspergillus niger, Aspergillus nidulans, Aspergillus clavatus, Neurospora crassa, Leuconostoc mesenteroides or Oenococcus oenii;
has the amino acid sequence of SEQ ID NO: 144, 146, 148, 150, 152, 154, 156, 158, 160, 162, 164, 166, 168, 170, 172 or 174, 231; and/or
is encoded by a nucleic acid molecule having the nucleic acid sequence of SEQ ID NO: 143, 145, 147, 149, 151, 153, 155, 157, 159, 161, 163, 165, 167, 169, 171 or 173.

3. The recombinant microorganism of claim 1, wherein the acetate kinase is:
heterologous;
of prokaryotic or eukaryotic origin;
derived from Bifidobacterium, Leuconostoc or Oenococcus species;
derived from Bifidobacterium adolescentis, Leuconostoc mesenteroides or Oenococcus oenii;
has the amino acid sequence of SEQ ID NO: 126, 128, 130 or 233; and/or
is encoded by a nucleic acid molecule having the nucleic acid sequence of SEQ ID NO: 125, 127 or 129.

4. The recombinant microorganism of claim 1, wherein the plurality of first native and/or heterologous enzymes further comprises:
a phosphotransacetylase.

5. The recombinant microorganism of claim 4, wherein the phosphotransacetylase is:
heterologous;
of prokaryotic or of eukaryotic origin;
derived from Clostridium, Bifidobacterium, Leuconostoc or Oenococcus species;
derived form Clostridium cellulolyticum, Clostridium phytofermentans, Bifidobacterium bifidum, Bifidobacterium animalis, Bifidobacterium adolescentis, Leuconostoc mesenteroides or Oenococcus oenii;
has the amino acid sequence of SEQ ID NO: 120, 122, 124 or 232; and/or
is encoded by a nucleic acid molecule having the nucleic acid sequence of SEQ ID NO: 119, 121 or 123.

6. The recombinant microorganism of claim 1, wherein the thiolase is:
heterologous;
of prokaryotic or eukaryotic origin;
encoded by a thl gene, a erg10 gene or a phaA gene;
derived from Clostridium, Saccharomyces, Cupriavidus, Clostridium, Yarrowia, Thermoanaerobacterium, Saccoglossus, Strongylocentrotus or Paenibacillus species;
derived from Clostridium acetobutylicum, Saccharomyces cerevisiae, Cupriavidus necator, Clostridium acetobutylicum, Clostridium kluyveri, Yarrowia lipolytica, Thermoanaerobacterium thermosaccharolyticum, Saccoglossus kowalevskii, Strongylocentrotus purpuratus or Paenibacillus polymyxa; and/or
has the amino acid sequence of SEQ ID NO: 230, 241, 242, 243, 244, 245, 246, 247 or 248.

7. The recombinant microorganism of claim 1, wherein the CoA transferase is:
heterologous;
of prokaryotic or eukaryotic origin;
encoded by a ctfA gene, a ctfB gene, a atoD and/or a atoA gene;
derived from Clostridium, Thermosipho, Escherichia, Paenibacillus, Alkaliphilus or Brevibacillus species;
derived from Clostridium acetobutylicum, Thermosipho melanesiensis, Escherichia coli, Paenibacillus polymyxa, Clostridium beijerinckii, Clostridium saccharoperbutylacetonicum, Clostridium sticklandii, Alkaliphilus metalliredigens, or Brevibacillus laterosporus; and/or
has the amino acid sequence of SEQ ID NO: 234, 235, 249, 250, 251, 252, 253, 254, 255, 256, 257, 258, 259, 260, 261, 262, 263, or 264.

8. The recombinant microorganism of claim 1, wherein the acetoacetate decarboxylase is:
heterologous;
of prokaryotic or eukaryotic origin;
encoded by a adc gene;
derived from Clostridium, Bacillus, Lactobacillus, Rhizobium, Bradyrhizobium, Tetrahymena, Aspergillus or Paenibacillus species;
derived from Clostridium acetobutylicum, Clostridium beijerinckii, Bacillus amyloliquefaciens, Lactobacillus casei, Rhizobium leguminosarum bv. trifolii, Bradyrhizobium japonicum, Tetrahymena thermophile, Aspergillus niger or Paenibacillus polymyxa; and/or
has the amino acid sequence of SEQ ID NO: 236, 265, 266, 267, 268, 269, 270 or 271.

9. The recombinant microorganism of claim 1, wherein the plurality of second native and/or heterologous enzymes further comprises:
an alcohol dehydrogenase.

10. The recombinant microorganism of claim 9, wherein the alcohol dehydrogenase is:
a bifunctional acetaldehyde/alcohol dehydrogenase;
of prokaryotic or eukaryotic origin;
encoded by a adhe or a sadh gene;
derived from an Escherichia, a Clostridium, a Chlamydomonas, a Piromyces, or a Bifidobacterium species;
derived from Escherichia coli, Clostridium phytofermentans, Clostridium beijerinckii, Chlamydomonas reinhardtii, Piromyces sp. E2, or Bifidobacterium adolescentis;
has the amino acid sequence of SEQ ID NO: 96, 98, 100, 103, 104, 105, 106, 102 or 219; and/or
is encoded by a nucleic acid molecule having the nucleic acid sequence of SEQ ID NO: 95, 97, 99, 101 or 218.

11. The recombinant microorganism of claim 1, wherein the plurality of first native and/or heterologous enzymes further comprises:
a pyruvate formate lyase.

12. The recombinant microorganism of claim 11, wherein the pyruvate formate lyase is:
heterologous;
from prokaryotic or eukaryotic origin;
encoded by a pfla gene and/or a pflb gene;
derived from Bifidobacterium, Escherichia, Thermoanaerobacter, Clostridium, Streptococcus, Lactobacillus, Chlamydomonas, Piromyces, Neocallimastix, or Bacillus species;
derived from Bacillus licheniformis, Streptococcus thermophilus, Lactobacillus plantarum, Lactobacillus casei, Bifidobacterium adolescentis, Clostridium cellulolyticum, Escherichia coli, Chlamydomonas reinhardtii, Piromyces sp. E2, or a Neocallimastix frontalis;
has the amino acid sequence of SEQ ID NO: 86, 90, 221 or 223; and/or
is encoded by the nucleic acid sequence of SEQ ID NO: 85, 89, 220 or 222.

13. The recombinant microorganism of claim 1, wherein the plurality of first native and/or heterologous enzymes further comprises further comprises:
an acetyl-CoA synthetase.

14. The recombinant microorganism of claim 13, wherein the acetyl-CoA synthetase is:
heterologous;
from prokaryotic or eukaryotic origin;
encoded by a acs2 gene;
derived from Saccharomyces, Acetobacter, Zygosaccharomyces or Salmonella species;
derived from Saccharomyces cerevisiae, Acetobacter aceti, Zygosaccharomyces bailii or Salmonella enterica;
has the amino acid sequence of SEQ ID NO: 2, 4, 6, 8 237, 238, 239 or 240; and/or
is encoded by a nucleic acid molecule having the nucleic acid sequence of SEQ ID NO: 1, 3, 5, or 7.

15. The recombinant microorganism of claim 1 comprising a deletion or an inactivation of one or more endogenous genes selected from GPD1, GPD2, and any combination thereof.

16. The recombinant microorganism of claim 1 further comprising:
a native and/or heterologous protein that function to import glycerol.

17. The recombinant microorganism of claim 16, wherein the native and/or heterologous proteins that function to import glycerol is STL1.

18. The recombinant microorganism of claim 17, wherein the STL1 is:
heterologous;
of prokaryotic or eukaryotic origin;
derived from Candida, Pichia or Saccharomyces species;
derived from Candida albicans, Pichia sorbitophila or Saccharomyces cerevisiae, or Saccharomyces paradoxus;
has the amino acid sequence of SEQ ID NO: 10; and/or
is encoded by a nucleic acid molecule having the nucleic acid sequence of SEQ ID NO: 9.

19. The recombinant microorganism of claim 1 being a recombinant yeast.

20. A process for converting a biomass into acetone and/or isopropanol, the process comprising contacting the biomass with the recombinant microorganism of claim 1 under conditions allowing the conversion of at least in part the biomass into acetone and/or isopropanol.

The application's sequence listing, which the Patent Office published only in electronic form, follows.

SEQUENCE LISTING (271 sequences)

SEQ ID NO: 1 - DNA, 2069 bp, Saccharomyces cerevisiae
atgtcgccctctgccgtacaatcatcaaaactagaagaacagtcaagtgaaattgacattgaaagcaaaaatgtcccagtctgcctccactgcgcagcagaagaaggaacatgagtgaacatttgacctcggtcaagatcgtgccacaacggcccatctcagatagactgcagcgcaattgctacccactattctccacacttggacgggttgcaggactatcagcgcttgcaaggagtctattgaagaccctgctaagttcttcggttctaaagctacccaatttttaatggtctaagccattcgataaggtgttcatcccagaccctaaaacgggcaggccctcctcagaacaatgcatggttcctcaacggccaattaaacgcctgttacaactgtgttgacacatgccttgaagacccctaacaagaaagccattattttcgaaggtgacgagcctggccggctattccattacctacaaggaactacttgaagaagtttgtcaagtggcacaagtgcacttactctatgggcgttcgcaagggcgatactgttgccgtgtacatgcctatggtccgaagcaatcataaccttgttggccatttcccgtatcggtgccattcactccgtagtctgccgggttttcttccaactccttgagagatcgtatcaacgatggggactctaaagttgatcactacagatgaatccaacagaggtggtaaagtcattgagactaaaagaattgttggacgcgctaagagagaccccaggcgtgagacacgtcttggtttatagaaagaccaacaccatctgttgctttccatgcccccagagatttggattgggcaacagaaaagaagaaataagacctactatccatgcacacccgttgattctgaggatccattattcttgttgtatatctggttctactggtgcccccaagggtgttcaacattctaccgcaggttacttgctgggctttgttgaccatgcgctacacttttgacactcaccaagaagacgttttcttcacagggagacattggctggattacaggccacacttatgtggtttatggtcccttactatatgtgtgccactttggtctttgaagggacgcctgcatacccaaattactcccgttattgggattattgatgaacacaaagtcacccaattttatgttgcgccaactgctttgcgtttgtaaaagagctggtgattcctacatcgaaaatcattccttaaaatctttgcgttgcttggtcggtcggtgagccaattgctgctgaagtttgggagtggtactctgaaaaaataggtaaatgaaatccccattgtagacacctactggcaaacagaatctggttcgcatctggtcaccgctggctggtggtgtcacaccaatgaaaccgggttctgcctcattccccttcttcgattgatgcagttgttcttgaccctaacactggtgaagaacttaacaccagccacgcagggtgtccttgccgtcaaagctgcatggccatcatttgcaagaactatttggaaaaatcgataggtatctagacacttatttgaacccttaccctggctactatttcactggtgatggctgcaaaggataaggatggttatatctggattttgggtcgtgtagacgatgtggtgagtctctggtcaccgtctgtctaccgctgaaattgaggctgctattatcgaagatccaagtggccgagtgtgctgttgtcggattcaacgatgacttgactggtcaagcagttgctgtttgtggtgttgaaaaacaaatctagttggtccaccgcaacagatgatgaattacaagatcaagaagcatttggtctttactgttagaaaagacatcgggccatttgccgcaccaattgatcattttagtggatgacttgcccaagacaagatctggcaaaattatgagacgtattaagaaaaatcctagcaggagaaagtgaccaactaggcgacgtttctacattgtcaacctggcattgttagacatctaattgattcggtcaagttg

SEQ ID NO: 2 - protein, 713 aa, Saccharomyces cerevisiae
MSPSAVQSSKLEEQSSEIDKLKAKMSQSASTAQQKKEHEYEHLTSVKIVPQRPISDRLQPAIATHYSPHLDGLQDYQRLHKESIEDPAKFFGSKATQFLNWSKPFDKVFIPDPKTGRPSFQNNAWFLNGQLNACYNCVDRHALKTPNKKAIIFEGDEPGQGYSITYKELLEEVCQVAQVLTYSMGVRKGDTVAVYMPMVPEAIITLLAISRIGAIHSVVFAGFSSNSLRDRINDGDSKVVITTDESNRGGKVIETKRIVDDALRETPGVRHVLVYRKTNNPSVAFHAPRDLDWATEKKKYKTYYPCTPVDSEDPLFLLYTSGSTGAPKGVQHSTAGYLLGALLTMRYTFDTHQEDVFFTAGDIGWITGHTYVVYGPLLYGCATLVFEGTPAYPNYSRYWDIIDEHKVTQFYVAPTALRLLKRAGDSYIENHSLKSLRCLGSVGEPIAAEVWEWYSEKIGKNEIPIVDTYWQTESGSHLVTPLAGGVTPMKPGSASFPFFGIDAVVLDPNTGEELNTSHAEGVLAVKAAWPSFARTIWKNHDRYLDTYLNPYPGYYFTGDGAAKDKDGYIWILGRVDDVVNVSGHRLSTAEIEAAIIEDPIVAECAVVGFNDDLTGQAVAAFVVLKNKSSWSTATDDELQDIKKHLVFTVRKDIGPFAAPKLIILVDDLPKTRSGKIMRRILRKILAGESDQLGDVSTLSNPGIVRHLIDSVKL

SEQ ID NO: 3 - DNA, 1981 bp, Saccharomyces cerevisiae
atgacaatcaaggaacataaagtagttcatgaagctcacaacgtaaaggctcttaaggcctcaacatttttacaacagccaacccggcaagggttacgttactgatatgcaacattcaagaaatgtatcaacaatctatcaatgagccagaaaaattctttgataagatggctagaatacttgcattgggatgctccatacaccaaagttcaatctggttcattgaacaatggatgttgcatggtttttgaacggtaaattgaatgcatcatacaattgtgttgacagacgcctttgctaatcccgacaagccagctttgatctatgaagctgatgacgaatccgacaaaaatcatcacatttggtgaattactcagaaaagtttcccaaatcgctggtgtcttaaagctggggcgttaagaaaggtgacacagtggctatctatttgccaatgattccagaaggtcattgctatgttggctgtggctcgtattggtgctattcactctgttgtctttgctgttctccgctggttcgttgaaagatcgtgtcgttgacgctaattctaaagtggtcatcatgtgatgaaggtaaaagaggtggtaagatcatcaacactaaaaaaattgttgacgaagttgaacggagtcgatttggtttcccgtatcttggttttccaaagaactggtactgaagattccaatgaaggccggtagagattactggtggcatgaggaggccgctaagcagagaatacctacctcctgtttcatgtgacgctgaagatcctctatttttgttatacacttccgtccactggttctccaaagggtgtcgttcacactacaggtggttatttattaggtgccgttaacaactagatacgtttttgatattcacccagaagatgttctcttcactgccggtggtcggctggatcacgggtcacacctatgctctatatggtccattaaccttgggtaccgtcaataattttcgaatccactcctgcctacccagattatggtagatattggagaattacaacgtcacaaggctacccatttctatgtggctccaactgctttaagattaatcaaacgtaggtgaagccgaaattgccaaatatgacacttcctcattacgtgtcttgggttccgggtgaaccaatctctccagacttatgggaatggtatcatgaaaaagtgggtaacaaaatgtgtcatttgtgacactatgtggcaaacagagtctggttctcatttaattgctccttgcaggtgctgtcccaacaaaacctggttctgctaccgtgccattctttggtattaacgtgtatcattgaccctgttacaggtgtggaattagaaggtaatgatgtcgaaggtgtccgccgttaaatcaccatggccatcaatggctagatctgtttggaaccaccacgaccgttatggatacttacttgaaaccttatcctggtcactatttcacaggtgatggtgctggtagatcatgatggttactactggatcaggggtagagttgacgacgttgtaaatgtttccgcatagattatccacatcagaaattgaagcatccatctcaaatcacgaaaacgtctcgggctgctgttgtcggtattccagatgaattgaccggtcaaaccgtcgttgcatatgtttctaaaagatggttatctacaaaacaacgctactgaaggtgatgcagaacacatcacacgataatttacgtagagaattgatcttacaagttaggggtgagattggtcctttcgcctccaaaaaccattattctagttagagatctaccaagaacaaggtcaggaaagattatgaagagttctaagaaaggttgcttctaacgaagccgaacagctaggtgacctaactacttgccaacccagaagttgtacctgccatcatttctgctgtagagaaccaatttttctctcaaaaagaaa

SEQ ID NO: 4 - protein, 683 aa, Saccharomyces cerevisiae
MTIKEHKVVHEAHNVKALKAPQHFYNSQPGKGYVTDMQHYQEMYQQSINEPEKFFDKMAKEYLHWDAPYTKVQSGSLNNGDVAWFLNGKLNASYNCVDRHAFANPDKPALIYEADDESDNKIITFGELLRKVSQIAGVLKSWGVKKGDTVAIYLPMIPEAVIAMLAVARIGAIHSVVFAGFSAGSLKDRVVDANSKVVITCDEGKRGGKIINTKKIVDEGLNGVDLVSRILVFQRTGTEGIPMKAGRDYWWHEEAAKQRTYLPPVSCDAEDPLFLLYTSGSTGSPKGVVHTTGGYLLGAALTTRYVFDIHPEDVLFTAGDVGWITGHTYALYGPLTLGTASIIFESTPAYPDYGRYWRIIQRHKATHFYVAPTALRLIKRVGEAEIAKYDTSSLRVLGSVGEPISPDLWEWYHEKVGNKNCVICDTMWQTESGSHLIAPLAGAVPTKPGSATVPFFGINACIIDPVTGVELEGNDVEGVLAVKSPWPSMARSVWNHHDRYMDTYLKPYPGHYFTGDGAGRDHDGYYWIRGRVDDVVNVSGHRLSTSEIEASISNHENVSEAAVVGIPDELTGQTVVAYVSLKDGYLQNNATEGDAEHITPDNLRRELILQVRGEIGPFASPKTIILVRDLPRTRSGKIMRRVLRKVASNEAEQLGDLTTLANPEVVPAIISAVENQFFSQKKK

SEQ ID NO: 5 - DNA, 1959 bp, Zygosaccharomyces bailii
atgactgttaaggaacacaaggttgttcacgaagctcaaaacgttgaagctttgcacgccagaacacttctacaagtctcaaccaggtccatcttacatcaaggacatgaagcaataaggaaatgtacaagcaatctgttgaagacccagaaaacttcttcggtgaaaaggctagaattgttggactgggacagaccattcactagatctaagtacggttctttggaaaacggacgttacttggttcttgaacggtgaattgaacgctgcttacaactgtgttgacagacgctttcgctaacccagacaagccagctttgatctacgaagctgacgaagaagctgacaagaatgatcactttctctgaattgttgagacaagtttctagagttgctggtgttttgctcttggggtgttaagaagggtgacactgttgctgtttacttgccaatgatcccagaaggttgttgctatgttggctatcgctagattgggtgctatccactctgttgttttcgctgttctctgctggttctttgaaggacagagttgttgacgctggttgtaaggttgttatcatgtgacgaaggtaagagaggtggtaagactgttcacactaagaagatcgttgacgaagttgaacggtatctctttggtttctcacatcttggttttccaaagaactggttctgaagatcccaatgactgctggtagagactactggtggcacgaagaaactgctaagcaaagattacttgccaccagttccatgtaactctgaagacccattgttcttgttgtacacttctgtctactggttctccaaagggtgttgttcactctactgctggttacttgttgggtgctgatgactactagatacgttttcgacatccacccagaagacgttttgttcactgctggtggttggttggatcactggtcacacttacgctttgtacggtccattggttttgggtactgtctatcatcttcgaatctactccagcttacccagactacggtagatactggagaatcacaaagacacaaggctactcacttctacgttgctccaactgctttgagattgatcaagagttggtgaagctgaaatcccaaagtacgacatctcttctttgagagttttgggttctgggtgaaccaatctctccagaattgtgggaatggtactacgaaaaggttggtaacaagatgtgttatctgtgacactatgtggcaaactgaatctggttctcacttgatcgctccacgctggtgctgttccaactaagccaggttctgctactgttccattcttcggtgttgacgtgtatcatcgacccagttactggtatcgaattgcaaggtaacgacgttgaaggtgtttgctgttaagtcttcttggccatctatggctagatctgtttggcaaaaccaccacagatgttgacacttacttgaagccatacccaggttactacttcactggtgacggtgctggtagaccacgacggttactactggatcagaggtagagttgacgacgttgttaacgtttctgcacagattgtctactgctgaaatcgaagcttctttgactaaccacgacaacgtttctgtctgctgttgttggtatcgctgacgaattgactggtcaatctgttatcgctttcgtttttgaaggacggttcttctagagaatcttctgctgttgttgctatgagaagagaattggttgcaagttagaggtgaaatcggtccattcgctgctccaaagtgtgttatcttggttagacttgccaaagactagatctggtaagatcatgagaagagttttgagaaaggttgcttaacgaagctgaccaattgggtgacttgtctactatggctaactctgaagttgttccatatcatcgctgctgttgacgaacaattcttcgctgaaaagaagaag

SEQ ID NO: 6 - protein, 675 aa, Zygosaccharomyces bailii
MTVKEHKVVHEAQNVEALHAPEHFYKSQPGPSYIKDMKQYKEMYKQSVEDPENFFGEKARELLDWDRPFTRSKYGSLENGDVTWFLNGELNAAYNCVDRHAFANPDKPALIYEADEEADNRMITFSELLRQVSRVAGVLQSWGVKKGDTVAVYLPMIPEAVVAMLAIARLGAIHSVVFAGFSAGSLKDRVVDAGCKVVITCDEGKRGGKTVHTKKIVDEGLNGISLVSHILVFQRTGSEGIPMTAGRDYWWHEETAKQRSYLPPVPCNSEDPLFLLYTSGSTGSPKGVVHSTAGYLLGAAMTTRYVFDIHPEDVLFTAGDVGWITGHTYALYGPLVLGTASIIFESTPAYPDYGRYWRIIQRHKATHFYVAPTALRLIKRVGEAEIPKYDISSLRVLGSVGEPISPELWEWYYEKVGNKNCVICDTMWQTESGSHLIAPQAGAVPTKPGSATVPFFGVDACIIDPVTGIELQGNDVEGVLAVKSSWPSMARSVWQNHHRYVDTYLKPYPGYYFTGDGAGRDHDGYYWIRGRVDDVVNVSGHRLSTAEIEASLTNHDNVSESAVVGIADELTGQSVIAFVSLKDGSSRESSAVVAMRRELVLQVRGEIGPFAAPKCVILVKDLPKTRSGKIMRRVLRKVASNEADQLGDLSTMANSEVVPSIIAAVDEQFFAEKKK

SEQ ID NO: 7 - DNA, 1959 bp, Salmonella enterica; identical to SEQ ID NO: 5

SEQ ID NO: 8 - protein, 675 aa, Salmonella enterica; identical to SEQ ID NO: 6

SEQ ID NO: 9 - DNA, 1657 bp, Pichia sorbitophila
atgggattcgaactttggggaaggaccaacacaggtggtttgagaggtagacctcttcgttgccatcaccgctgttgcaactactggtttctcccttttcggttatgatcagggttatgtctggtattattaccggtactgaatttaacgaggagttccctccaacctggtccaccacattacaacgcgtctgagaagagacatgctactgttgttcaaggtgctgttacagtgttacgaaattggttgtttcttcggtgctctttttgctttggttagaggtgacaggaggtagacgtccacttgtcattgttggtgctgttcttatcatcattggtactgttatttactgctgcttttggtgaacactggggtttgggtcaattcgttattggtagagttattaggtattggtaacggtatgaacacagcaactatcccagtctggcaatctgagatctctcccagaaaacagaggtaagttagtcaacttggaaggttcagtcattgccattggtacttgttgcttactggattgatttcggtctctcctacgttaacagctctgtacaatggagatcctgttgcgttccaaattgtttttgctgctggacttcttggaggtattcttttcatgcgagtctcctagatggttgctcgctcatggcaagaaggagcaagcacacatagtcttaggctttgaatgatctcgaccctaatgatgaccatgtccttgctgagagtactgttattagatgctattaacagattctccaggtctcaacttggtttcaaggaacttatgtccggtgaagaaccaacattttgctagaatggttattggttcttccactcaatttttccaacagtactggttgtaatgctgccatttactattcaacagttttgttcgaagagaccattttcgggtgacagaagattgtctttggttatgggtggtgttttcgcttccgtatacgcccttgactattccatctttcttcttagtcgataagcttggtagaagaaacttgttcttgattggctactggtcaagctttgtctttcaccattacatttgcttgtttgatcaacccaacaacaaaatgctaagggtgcagctgttggtatcttcttgtttatcaccttcttcgcctttaattttgccattgccttggatttacccaccagaaatcaacccattgagaacaagaactggcctctgccgtttctacatgtaccaattggcttacaaactttgccgtcgttatgtttacctattttcattaacgatgctcaatggggttgttacttgttctttgcttgtttgaactgctttcattccagttatcttctggttctacccagaaactgctggccgttccttggaagattgatatcattttcgcgaaggcttacactgatggaagacctccatggagagttgctgaccatgccacacttgtctttgaaggaacaagaggagcaaggtatgcaactcggactttgacaatgaagctgagaaacagaagttcgagcaaaccgagaacttgatgtcttctagcttctgcgaagcttcctgaagagggatctaacgtaaacgagaatgagaacgaaaacacgagaaaaggatcaaacaccaaagccaactgatgtt

SEQ ID NO: 10 - protein, 571 aa, Pichia sorbitophila
MGFELWGRTNTGGLRGRPLRVAITAVATTGFSLFGYDQGLMSGIITGTEFNEEFPPTWSKPHYNASEKRHATVVQGAVTACYEIGCFFGALFALVRGDRIGRRPLVIVGAVLIIIGTVISTAAFGEHWGLGQFVIGRVITGIGNGMNTATIPVWQSEISRPENRGKLVNLEGSVIAIGTFVAYWIDFGLSYVNSSVQWRFPVAFQIVFAAGLLGGILFMPESPRWLLAHGKKEQAHIVLGALNDLDPNDDHVLAESTVITDAINRFSRSQLGFKELMSGGKNQHFARMVIGSSTQFFQQFTGCNAAIYYSTVLFEETIFVGDRRLSLVMGGVFASVYALATIPSFFLVDKLGRRNLFLIGATGQALSFTITFACLINPTKQNAKGAAVGIFLFITFFAFTILPLPWIYPPEINPLRTRTVASAVSTCTNWLTNFAVVMFTPIFINDAQWGCYLFFACLNYAFIPVIFWFYPETAGRSLEEIDIIFAKAYTDGRPPWRVAATMPHLSLKEQEEQGMQLGLYDNEAEKQKFEQTENLMSSSSSAKLPEEGSNVNENENENTNEKDQTPKPTDV

SEQ ID NO: 11 - DNA, 1624 bp, Saccharomyces cerevisiae
atgtcgctgatcagcatcctgtctcccctagttacttccgagggcttagattcaagaaaaaccttcaccaaaaaaggatgcctctactactactaagccatcactatggaaaactagagttcaaattctactacattgcatttttggtcgtggttcccttgatgttctatgctgttacaagctagttcgcccgaaaatccaaactatgcaagatacgaacgtctcctatctcggttggttatttggcagaaaagtagacaatagtgattctcaatataggtttttcagggaattttgcgctattgtcagttttaatgctagtccacacttctataaaacgcattgtactattcaacaaatatcactaaattgaggtttgatctgatatttggtttgatctttttaggccgctcatggtgtcaattcgataagaattttagcccatatgctaattttatatgccagcccatgtactaaagaactttagaagaatagccaccatcagcatttggatttatggtatctacgctttttattaacgacaacttcagagcatatccatttggtaatatttgctcttttaagcccattggaccattggtatagaggtatcattccaagatgggatgtctttttcatttactcttttgagagtcttaagttacaacttggacttcttagagaggtgggagaattcaaaagaagaaaagtccatcctatgaatcaaaagaagctaaatcagccattttgctcagaacgtgctagattaactgctgcacaccccatacaggactacagcttaatgaattatagcatatgttacttacacgccacttttcattgccggccccattataacattcaatgattgtttaccaatcgaaacataccttgccatcaataaatttcaaattcattttttactatggtgagattcgttattgctctcttatctatggagttcattttacactttctctacgttggcaatctcaaaaaccaaagcgtgggaaaatgacacacctttccagatttccatgattgttatttaatttgaatattatttggctaaaactactgattccgtggaggctgtttaggctgggctttgctagacggaatcgatacacctgaaaatatgatcaggtgtgttgataacatacagttcactagcattctggagagcttggcataggagctacaataagtgggttgtcctacatatatattcctctaggtggctcaaaaaatagagttttgacatcactagcagtcttccttcgtagctatatggcatgacatcgaactaaagttattattatggggttggctaagttttgttcctcttaccagaaatttttgctacccaaattttctctcattataccgacggtctggtacagacacgtttgcgctgtcggtgctgttttcaacatatgggttatgatgagctaatctttttggattctgcttgggctctgacggtactaaaaaattactaagcgatattctgtaccgtatctggtttcaaatttgtaattttggcaagcgttagtttattcatcggtacaaataatgtttgaaatcagagaagaagaaaagaggcacggaatttacctaaaat

SEQ ID NO: 12 - protein, 560 aa, Saccharomyces cerevisiae
MSLISILSPLVTSEGLDSRIKPSPKKDASTTTKPSLWKTTEFKFYYIAFLVVVPLMFYAGLQASSPENPNYARYERLLSQGWLFGRKVDNSDSQYRFFRDNFALLSVLMLVHTSIKRIVLYSTNITKLRFDLIFGLIFLVAAHGVNSIRILAHMLILYAIAHVLKNFRRIATISIWIYGISTLFINDNFRAYPFGNICSFLSPLDHWYRGIIPRWDVFFNFTLLRVLSYNLDFLERWENLQKKKSPSYESKEAKSAILLNERARLTAAHPIQDYSLMNYIAYVTYTPLFIAGPIITFNDYVYQSKHTLPSINFKFIFYYAVRFVIALLSMEFILHFLYVVAISKTKAWENDTPFQISMIGLFNLNIIWLKLLIPWRLFRLWALLDGIDTPENMIRCVDNNYSSLAFWRAWHRSYNKWVVRYIYIPLGGSKNRVLTSLAVFSFVAIWHDIELKLLLWGWLIVLFLLPEIFATQIFSHYTDAVWYRHVCAVGAVFNIWVMMIANLFGFCLGSDGTKKLLSDMFCTVSGFKFVILASVSLFIAVQIMFEIREEEKRHGIYLKC

SEQ ID NO: 13 - DNA, 3480 bp, Saccharomyces cerevisiae
ttgacggcagttctcatagcatctcaaagcaatagcagtgcaaaagtacataaccgtaaaggtacgcggtaggtatttgagttcgttggtggttatcctccgcaaggcgcttcggcttatttgttgatagtcgaagaacaccaaaaaaaatgctgttattgctttctccgtaaaataaaacccggtagcgggataacgcggctgatgcttttatttaggaaggaatacttactatcatgagaacattgtcaagggcattctgatacgggccttccatcgcaagaaaaagggcaacggactgagggacggagagagttacggcataagaagtagtaggagagcagagtgataaagttatattattctcgtcctaaagtcaattagttctgttgcgcttgacaatatatcgtgtaataccgtcccttagcagaagaaagaaagacggatccatatatgttaaaatgtcagagatgtttctttaatgtgccgtccaacaaaggtatcttctgtagcttcctctattcgatcagatctcatagtgagaaggcgcaattcagtagttaaaagcggggaacagtgtatccggagacggcaagattgcccggccctttttgcggaaaagataaaacaagatatatcactttttccaccaagaaaaacaggaagtggattaaaaaatcaacaaagtataacgccttgtcccaataagcgtcggttgttcttctttattattttaccaagtacgctcgagggtattctaatgcattaaaagacatgagtaatcctcaaaaagctctaaacgactttctgtcgtgaatctgttcatacacatgatagttctaggaaacaatctaataagcagtcatccgaaaggacgctcttcatcacaaccttcacatcatcactctggtggtactaacaacaataaacaataataataataataataacagtaacaacaacaacaacggcaacgatgggggaaaatgacgactatgattatgaaatgcaagattatagaccttctccgcaaagtgcgcggccctcccacgtatgttccacaatattctgtagaaagtgggactgctttcccgattcaagattattcctagcgcatacattaacacacaagatataaaccataaagataacggtccgccgtgcaagcagtaatagagcattcaggcctagagggcagaccacagtgtcggccaacgtttaacattgaagatttttacaaaaatgcagacgatgcgcataccatcccggagtcacatatcgagaaggagaagtaggtcgagggctacgagtaatgctgggcacagtgccaatacgcgccacgaatggcaggactactggtgcccaaactaatatggaaagcaatgaatcaccgtaacgtccccattatggtgaagccaaagacattataccagaaccctcaaacacctactcttgccctccacataccatccaattaataaatggtcttccgtcaaaaacacttatttaggaatttttagccgagtttatgggaacaatggttatgattattttcggtagtgctgttttgtcaggtcaatgttgctgggaaaatacagcaggacaatttcaacgtggctttggaaccttaacgttaccgggtcttctgcagaaacgatagacgctatgaagagtttaacatctggtttcatccgttgcgggcggtacctttgatgatgtggcattgggctgggctgctgctggtgatgggctatttctgcgctggtggtagtgccatctcaggtgctcatttgaatccctattacattagccaatttggtgtatagaggttttcccctgaagaaagttccttattattgctggacaattgatcggtgccttcacaggcgctttgatcttgtttatttggtacaagggtgttacaagaggcatatagcgattggtggatgaatgaaagtgttgcgggaatgttgcgtttttccaaagccttatctaagttcaggacggcaatttttttccgaatttttatggagctatgttacaagcaggaacatttgcgctgaccgatccttatacgtgtttgtcctcatgttttcccattgatgatgtttattttgattttcattatcaatgcttccatggcttaagacaggtacagcaatgaatttggctcgtgatctgggcccacgtcttgcactatatgcttggatttgatcataaaatgctttgggtgcatcatcatcatttcttttgggttcccattaggcccatttattggtgcgttaatgggggggttggtttacgatgtctgtatttatcagtcatgaatctccagtcaactggtctttaccagtttataaggaaatgattatgagagcggtttagaaggcctggttggaagaagagaaatagagcaagaagaacatcggacctgagacttctcatacaataacgatgatgatgaggaatttggagaaagaatggctcttcaaaacaaagaccaagtcatctatttcagacaacgaaaatgaagcaggagaaaagaaagtgcattaaatctgttcagcgcggcaaaagaacgtttggtggtataccaacaattcttgaagaaagattccattgaaactgcttcgctaggtgcgacgacgactgattctattgggttatcacacatcatcagaagattcgcattatggtaatgctaagaaggtaacatgagaaaacagaagaaaaagaaacaaataatatagactgatagaaaaaaatactgcttactaccgccggtaatatatatatatatatatatttacatagatgattgcatagtgttttaaaaagcttttaggttaagctatgaatcttcataacctaaccaactaaatatgaaaatactgacccattcttaagtaagttgacatgaactcagcctggtcacctactatacatgatgtatcgcatatggaaagaataccaaacgctaccttccaggttaatgatagtatccaaacctagttggtttgccttgaacatcaagcagcgattcgatatcagttgggagcatcaatttggtcattaataccatctatgcttttctcctcccatattcgcaaaagtagtaagggctcgttatatttttgaatatgtaagatataattctatatgatttagtaatttattttctatacgctcaatttttctgcagttgtcgagtaggtattaaacgcaaaagaagtccatccttttcatcacaaatggacatcttggcaaagggcccagttatggaaaatctgggagtcatacaacgatcagttggctatgccactcctggtaaggaatcatcaagtctgataattctgttttttagctttttttttttttttcatggtgttctcttctcattgcttttcaattttaagttcgttctttcatatagagtttcttaacagaaatttcacaacgaaaatataattaactacaggc

SEQ ID NO: 14 - protein, 669 aa, Saccharomyces cerevisiae
MSNPQKALNDFLSSESVHTHDSSRKQSNKQSSDEGRSSSQPSHHHSGGTNNNNNNNNNNNNSNNNNNGNDGGNDDDYDYEMQDYRPSPQSARPTPTYVPQYSVESGTAFPIQEVIPSAYINTQDINHKDNGPPSASSNRAFRPRGQTTVSANVLNIEDFYKNADDAHTIPESHLSRRRSRSRATSNAGHSANTGATNGRTTGAQTNMESNESPRNVPIMVKPKTLYQNPQTPTVLPSTYHPINKWSSVKNTYLKEFLAEFMGTMVMIIFGSAVVCQVNVAGKIQQDNFNVALDNLNVTGSSAETIDAMKSLTSLVSSVAGGTFDDVALGWAAAVVMGYFCAGGSAISGAHLNPSITLANLVYRGFPLKKVPYYFAGQLIGAFTGALILFIWYKRVLQEAYSDWWMNESVAGMFCVFPKPYLSSGRQFFSEFLCGAMLQAGTFALTDPYTCLSSDVFPLMMFILIFIINASMAYQTGTAMNLARDLGPRLALYAVGFDHKMLWVHHHHFFWVPMVGPFIGALMGGLVYDVCIYQGHESPVNWSLPVYKEMIMRAWFRRPGWKKRNRARRTSDLSDFSYNNDDDEEFGERMALQKTKTKSSISDNENEAGEKKVQFKSVQRGKRTFGGIPTILEEEDSIETASLGATTTDSIGLSDTSSEDSHYGNAKKVT

SEQ ID NO: 15 - DNA, 1935 bp, Saccharomyces cerevisiae
atgagtaatcctcaaaaagctctaaacgactttctgtccagtgaatctgttcatacacgatagttctaggaaacaatctaataagcagtcatccgacgaaggacgctcttcatcacccttcacatcatcactctggtggtactaacaacaataataacaataataataataataagtaacaacaacaacggcaacgatgggggaaatgatgacgactatgattatgaaatgcgattataggccttctccgcaaagtgcgcggcctactcccacgtatgttccacaatattgtagaaagtggggctgctttcccgattcaagaggttattcctaacgcatacattaacacaagatataaaccataaagataacggtccgccgagtgcaagcagtaatagagcattcacctagagggcagaccacagtgtcggccaacgtgcttaacattgaagatttttacaaaagcagacgatgcgcataccatcccggagtcacatttatcgagaaggagaagtaggtcgagctacgagtaatgctgggcacagtgccaatacaggcgccacgaatggtaggactactggcccaaactaatatggaaagcaatgaatcaccacgtaacgtccccattatggtgaagcaagacattataccagaaccctcaaacacctacagtcttgccctccacataccatccaaaataaatggtcttccgtcaaaaacacttatttgaaggaatttttagccgagtttatggacaatggttatgattatttttggtagtgcagttgtttgtcaggtcaatgtagctgggaatacagcaggacaatttcaacgtggctttggataatcttaacgttaccgggtcttctggaaacgatagacgctatgaagagtttaacatccttggtttcatccgttgcgggcggtatttgatgatgtggcattaggctgggctgctgccgtggtgatgggctatttctgcgctgggtagtgccatctcaggtgcccatttgaatccgtctattacattagccaatttggtgtagaggttttccgctgaagaaagttccttattactttgctggacaactgatcggtgcctacaggcgctttgatcttgtttatttggtacaaaagggtgttgcaagaggcatatagcgtggtggatgaatgaaagtgttgcgggaatgttttgcgtttttccaaagccttatctaatcaggacggcaatttttttccgaatttttatgtggagctatgttacaagcaggaacatgcgctgaccgatccttatacatgtttgtcctctgatgttttcccattgatgatgtttattgattttcattatcaatgcttccatggcttatcagacaggtacagcaatgaatttggcgtgatctgggcccacgtcttgcactatatgcagttggatttgatcataaaatgctttgtgcatcatcatcatttcttttgggttcccatggtaggcccatttgttggtgcgttaaggggggttggtttacgatgtctgtatttatcagggtcatgaatctccagtcaactggtttaccagtttataaggaaatgattatgagagcctggtttagaaggcctggttggaagaagaaatagagcaagaagaacatcggacctgagtgacttctcatacaataacgatgatggaggaatttggagaaagaatggctcttcaaaagacaaagaccaagtcatctatttcagaacgaaaatgaagcaggagaaaagaaagtgcaatttaaatctgttcagcgtggcaagaacgtttggtggtataccaacaattcttgaagaagaagattccattgaaactgcttcgcggtgcgacgacgactgattctattgggttatccgacacatcatcagaagattcgcattggtaatgctaagaaggtaaca

SEQ ID NO: 16 - protein, 417 aa, Saccharomyces cerevisiae
MSNPQKALNDFLVMIIFGSAVVCQVNVAGKIQQDNFNVALDNLNVTGSSAETIDAMKSLTSLVSSVAGGTFDDVALGWAAAVVMGYFCAGGSAISGAHLNPSITLANLVYRGFPLKKVPYYFAGQLIGAFTGALILFIWYKRVLQEAYSDWWMNESVAGMFCVFPKPYLSSGRQFFSEFLCGAMLQAGTFALTDPYTCLSSDVFPLMMFILIFIINASMAYQTGTAMNLARDLGPRLALYAVGFDHKMLWVHHHHFFWVPMVGPFIGALMGGLVYDVCIYQGHESPVNWSLPVYKEMIMRAWFRRPGWKKRNRARRTSDLSDFSYNNDDDEEFGERMALQKTKTKSSISDNENEAGEKKVQFKSVQRGKRTFGGIPTILEEEDSIETASLGATTTDSIGLSDTSSEDSHYGNAKKVT

SEQ ID NO: 17 - DNA, 735 bp, Bacillus licheniformis
atggatggaaatattcattcgatcgaaacattcggcaccgttgacggtccaggcatcatatgtcgtcttcacacaaggctgcctgatgcgctgtcaattttgccataatgctgatatgggaaatcggaaccggaaaacaaatgacggtttccgaaatcgttcaggatgtccagctatctcccgtttattcaatcatcgggcggaggcatcaccgtgagcggaggcgagccgcttacaactgccgtttttaatcgagctgttcaaagcatgcaaaagcctcggcattcacagcactcgattcgtccggcggatgctattcggctgcgccggcatttcaagagcagatcagaactgatccagtatacagaccttgttttgcttgacctcaagcatcacaacagaaaaacatatcaacctgacaggaatgccgaatgaccacattttagaatttgcccggtttctcggaacatcaagttcccgtctggatccgccacgtactggttccggggatctccgatatcggccgatttaacggccctcggcacgtttatcggcacgcttgcgaacgttcagaaggtgggttcttccttatcacaagctcggcgtctacaaatgggaagcgcttggcctggattatcttaaaaggggttgaaccgccaagtgccgacagggccgaaaatgcgtacagactgctcagcacacttgcaaggcggatccttgctgcaagagacataa

SEQ ID NO: 18 - protein, 252 aa, Bacillus licheniformis
MDGNIHSIETFGTVDGPGIRYVVFTQGCLMRCQFCHNADTWEIGTGKQMTVSEIVQDVQHYLPFIQSSGGGITVSGGEPLLQLPFLIELFKACKSLGIHTALDSSGGCYSAAPAFQEQIKELIQYTDLVLLDLKHHNRKKHINLTGMPNDHILEFARFLAEHQVPVWIRHVLVPGISDIDADLTALGTFIGTLANVQKVEVLPYHKLGVYKWEALGLDYPLKGVEPPSADRAENAYRLLTAHLQGGSLLQET

SEQ ID NO: 19 - DNA, 735 bp, Bacillus licheniformis; identical to SEQ ID NO: 17

SEQ ID NO: 20 - protein, 252 aa, Bacillus licheniformis; identical to SEQ ID NO: 18

SEQ ID NO: 21 - DNA, 775 bp, Streptococcus thermophilus
atggcagaaattgattacagtcaggtgactggacttgttcattcaaccgaaagtttcgtccgtagatggtcctggtatccgttttattgtgtttatgcaaggctgtaagctgcgttcaatattgtcataacccagatacttgggccatgaagtcaaataaggctgttgaacgtagttgaagatgtcttagaagaggctcttcgcttccgtcatttctggggtgagcatggtgatcactgtatcaggtggtgaagccatgcttcagattgattttgtcactgccctctttagaggctaagaagttagggattcactgtacgcttgatacgtgtggcttgtcttatcgtaactccagagtatcatgaagttgtcgacaaacttttggctgtaactgacttggttctacgatatcaaagagattgaccccgaacaacacaagtttgtgacccgtcaacctaataagaatcttggaatttgctcaatatctgtctgataaacaagttccggtctggattcgtcatgttggtacctggtttgacagattttgacgaacacttggttaagctcggcgagtttgtaaaccttgaaaaatgtcgataaatttgaaattcttccatatcatacgatgggggaattcatggcgtgaacttggcatcccttatccattggaaggtgtcaaaccaccaactgcagatcgttaaaaatgctaaggctcttatgcatacggaaacttatcaagagtataagaatcgtaggggttaaaaccttggattaa

SEQ ID NO: 22 - protein, 266 aa, Streptococcus thermophilus
MAEIDYSQVTGLVHSTESFGSVDGPGIRFIVFMQGCKLRCQYCHNPDTWAMKSNKAVERTVEDVLEEALRFRHFWGEHGGITVSGGEAMLQIDFVTALFTEAKKLGIHCTLDTCGLSYRNTPEYHEVVDKLLAVTDLVLLDIKEIDPEQHKFVTRQPNKNILEFAQYLSDKQVPVWIRHVLVPGLTDFDEHLVKLGEFVKTLKNVDKFEILPYHTMGEFKWRELGIPYPLEGVKPPTADRVKNAKALMHTETYQEYKNRIGVKTLD

SEQ ID NO: 23 - DNA, 775 bp, Streptococcus thermophilus; identical to SEQ ID NO: 21

SEQ ID NO: 24 - protein, 266 aa, Streptococcus thermophilus; identical to SEQ ID NO: 22

SEQ ID NO: 25 - DNA, 775 bp, Streptococcus thermophilus; identical to SEQ ID NO: 21

SEQ ID NO: 26 - protein, 266 aa, Streptococcus thermophilus; identical to SEQ ID NO: 22

SEQ ID NO: 27 - DNA, 778 bp, Lactobacillus plantarum
atgccaacgatcacaactaagacgcccgtaaaaggactaatatttaacattcaaaaatagtatcaatgatggaccaggtattcgaacagtagttttctttaaagggtgcccgttactgcaagtggtgttctaatccagaatcacaatcaggtgagcaagaatcaatgtatgatgcagaccgccaagcaaaccatcgtcggtgattatatgacggttgatgatattatgaaagattctacaagataaagacttctatgaagagtctggcggtggggtaaccttctctggtggaagttctttttcaagcttcctttgcgattgagcttgctaaggcagttaaagcagctgattaatttagcctgtgagacaactggttacgcacggcctaaggtttttaatgaattcatcttatatggacttcatgtattatgactgtaaacaatgggacccagcccaacatcgaaggaacgggtgccgataacggggtaattttacgtaacttagcaactgcagtgcaagctccaaaagatgatggttcggattccggttattccaggttttaattatacattgaatgacggatcattttggacaactatttaatcagattggcgtaaccgaagttgaattattgccatcaccagtttgggttgaaaaagtatcaagatttgggccgaaaatatgcgctagttaatgaaacagttacaagcggatgacttaattgattatgctgaacatattcgtgcacatggtgaaagtacgggtgaatgggtggtaa

SEQ ID NO: 28 - protein, 267 aa, Lactobacillus plantarum
MPTITTKTPVKGLIFNIQKFSINDGPGIRTVVFFKGCPLRCKWCSNPESQSGEQESMYDEQTAKQTIVGDYMTVDDIMKVILQDKDFYEESGGGVTFSGGEVLFQASFAIELAKAVKAAGINLACETTGYARPKVFNEFMSYMDFMYYDCKQWDPAQHRIGTGADNGVILRNLATAVQAHQKMMVRIPVIPGFNYTLNDADHFGQLFNQIGVTEVELLPFHQFGLKKYQDLGRKYALVNVKQLQADDLIDYAEHIRAHGVKVRVNGW

SEQ ID NO: 29 - DNA, 796 bp, Lactobacillus plantarum
atggaaaacaaacaagtttcaacaacgcaagcggcggcaaaggagcctttgataggctgttcactccatcgaaacgtttggctccgttgacggaccaggtatccgttacgtggcatcttcaaggatgccacatgcgttgccaatactgtcacaaccctgatacttggaaactcagttggcgatcaaatgacggccgacgagattctcgaagacgcggctaaataccgggctttggggcaagacgggtggcatcacagtcagtggtggtgaatcactggtacaaatcgactatcttagacttattcgaaaaagccaaggcgatgaatatcagtacttgtctggatacctggacagccttttacccgagaacaacctttctttgacaagttcgaacgtctaatgaaggacggacatttcgttggtcgacattaagcacatcgattctgccaaacacaagcagttgacagtatgggaacgaaaatatcttggatatgattcagtacatggcccaacaccacgatgatgtggattcgtcacgtcctggttccccaacggactgattacgatgaagacttgaagactcggcgattacattgctaaaattccaaacgacgtcgttcaaaaagtcgaagtattgctaccatactttgggcgttaaaaaatatcatgaaatgaagatcaagtaccggcttgaagatcgagtctccaacccaagatcgggtggcaaatgccgaaaagctactgcacactgctgtacaacgggtacaagacatggatgccattgccaaaactttaa

SEQ ID NO: 30 - protein, 273 aa, Lactobacillus plantarum
MENKQVSTTQAAAKEPLIGYVHSIETFGSVDGPGIRYVAFLQGCHMRCQYCHNPDTWKLNVGDQMTADEILEDAAKYRAFWGKTGGITVSGGESLVQIDFILDLFEKAKAMNISTCLDTSGQPFTREQPFFDKFERLMKVTDISLVDIKHIDSAKHKQLTQYGNENILDMIQYMAQHHDDMWIRHVLVPQRTDYDEDLKKLGDYIAKIPNDVVQKVEVLPYHTLGVKKYHEMKIKYRLEGIESPTQDRVANAEKLLHTADYNGYKTWMPLPKL

SEQ ID NO: 31 - DNA, 796 bp, Lactobacillus plantarum
atggaaaacaaacaagtttcaacaacgcaagcggcggcaaaagagcctttgataggctgttcactccatcgaaacgtttggctccgttgacggaccaggtatccgttacgtggcatcttcaaggatgccacatgcgttgccaatactgtcacaaccctgatacttggaaactcagttggcgatcaaatgacggccgacgagattctcgaagacgcggctaaataccgggctttggggcaagacgggtggcatcacagtcagtggtggtgaatcactggtacaaatcgactatcttagacttattcgaaaaagccaaggcgatgaatatcagtacttgtctggatacctggacagccttttacccgagaacaacctttctttgacaagttcgaacgtctaatgaaggacggacatttcgttggtcgacattaagcacatcgattctgccaaacacaagcagttgacagtatgggaacgaaaatatcttggatatgattcagtacatggcccaacaccacgatgatgtggattcgtcacgtcctggttccccaacggactgattacgatgaagacttgaagactcggcgattacattgctaagattccaaacgacgtcgttcaaaaagtcgaagtattgctaccatactttgggcgttaaaaaatatcatgaaatgaagatcaagtaccggcttgaagatcgagtctccaacccaagatcgggtggcaaatgccgaaaagctactgcacactgctgtacaacgggtacaagacatggatgccattgccaaaactttaa

SEQ ID NO: 32 - protein, 273 aa, Lactobacillus plantarum; identical to SEQ ID NO: 30

SEQ ID NO: 33 - DNA, 778 bp, Lactobacillus plantarum; identical to SEQ ID NO: 27

SEQ ID NO: 34 - protein, 267 aa, Lactobacillus plantarum; identical to SEQ ID NO: 28

SEQ ID NO: 35 - DNA, 824 bp, Lactobacillus casei
atgaaactcatcgatcagtcacaaagcccattaaatatcttagaacaagttggtcaggcatgatggcccgatcaaagggtatgttcactcggtcgaaagttttggttcggtcgatgcctggtattcgcttcgttgtctttatgcaagggtgtcgcatgcgttgccagtattgtcaaccctgacacctggaacattggggttggtgaagaaatgacggccgatcaaattttgggatgcccagcgctataaagcattctggggtgaccaagggggtattacctgcagtggcggagagtttggtacaaatcgatttcattctcgaactcttcaccaaggctaaggcactggatttcgacttgcctcgatacgtcaggtggccccttcacgcgtgaccaaccgtggtttgcagtttgaaaagctgatggctgttactgacatctcattagttgatattaaacacattgtcggccgagcataaaaagctcaccggttttcctaatgagaatattttggatatggtgctatatgtcggcgcatggtgatgacatgtggattcgccacgttctggtcccggaacgcagactttgacccttatctcaaacggttaggggactatattgcgacattggacaaaaacggtccaaaaagttgagattctgccgtatcacacgttaggcgttaaaaagtatcacgagcggcattacgtacccgcttgaaggcatcgaaccgccgtctgccgaacgcgttaagaatggagaatctgctgcacgttaaggattataccggatggcaaagctggcgtccgaaaccaggcgagcaactga

SEQ ID NO: 36 - protein, 283 aa, Lactobacillus casei
MKLIDQSQSPLNILEQVGQDHDGPIKGYVHSVESFGSVDGPGIRFVVFMQGCRMRCQYCHNPDTWNIGVGEEMTADQILADAQRYKAFWGDQGGITCSGGESLVQIDFILELFTKAKALGISTCLDTSGGPFTRDQPWFGQFEKLMAVTDISLVDIKHIDSAEHKKLTGFPNENILDMVQYMSAHGDDMWIRHVLVPERTDFDPYLKRLGDYIATLDKNVVQKVEILPYHTLGVKKYHELGITYPLEGIEPPSAERVKNAENLLHVKDYTGWQSWRPKPVASN

SEQ ID NO: 37 - DNA, 824 bp, Lactobacillus casei
atgaaactcatcgatcagtcacaaagcccattaaatatcttagaacaagttggtcaggcatgatggcccgatcaaagggtatgttcactcggtcgaaagttttggttcggtcgatgcctggtattcgcttcgttgtctttatgcaagggtgtcgcatgcgttgccagtattgtcaaccctgacacctggaacattggggttggtgaagaaatgacggccgatcaaattttgggatgcccagcgctataaagcattctggggtgaccaagggggtattacgtgcagtggcggagagtttggtacaaatcgatttcattctcgaactcttcaccaaggctaaggcactggatttcgacttgcctcgatacgtcaggcggccccttcacgcgtgaccaaccgtggtttgcagtttgaaaagctgatggctgttactgacatctcattagttgatattaaacacatcgtcggccgagcataaaaagctcaccggttttcctaatgaaaatattttagatatggtgctatatgtcggcgcatggtgatgacatgtggattcgccacgttctggtcccggaacgcagactttgacccttatctcaaacgattaggggactatattgcgacattggacaaaaacggtccaaaaagttgagattctgccgtatcacacgttaggcgttaaaaagtatcacgagcggcattacgtacccgcttgaaggcatcgaaccgccgtctgccgatcgcgttaagaatggagaatctgctgcacgttaaggattataccggatggcaaagctggcgtccgaaaccaggcgagcaactga

SEQ ID NO: 38 - protein, 283 aa, Lactobacillus casei
MKLIDQSQSPLNILEQVGQDHDGPIKGYVHSVESFGSVDGPGIRFVVFMQGCRMRCQYCHNPDTWNIGVGEEMTADQILADAQRYKAFWGDQGGITCSGGESLVQIDFILELFTKAKALGISTCLDTSGGPFTRDQPWFGQFEKLMAVTDISLVDIKHIDSAEHKKLTGFPNENILDMVQYMSAHGDDMWIRHVLVPERTDFDPYLKRLGDYIATLDKNVVQKVEILPYHTLGVKKYHELGITYPLEGIEPPSADRVKNAENLLHVKDYTGWQSWRPKPVASN

SEQ ID NO: 39 - DNA, 851 bp, Bifidobacterium adolescentis
atgtctgaacatattttccgttccacgaccagacacatgctgagggattccaaggactgtcaatcagacgctgatgggaggcctgtccggattcgaatcgccaatcggcttggaccctcgaccgcatcaaggcgttgaaaagcggcgatatcggtttcgtgcactcgtgggacaaacacttccgtggatggtcctggcaccagaatgaccgtgttcatgagcggatgccctccgctgccagtactgccagaatccggatacttggaagatgcgcgacggcaagcccgtcttacgaagccatggtcaagaaaatcgagcggtatgccgatttattcaaggccaccggcgggcatcactttctccggcggcgaatccatgatgcagccggctttcgtgtcacgcgtgtcatgccgccaagcagatgggagtgcatacctgcctcgacacgtccggattcctcggggagctacaccgatgacatggtggatgacatcgacctgtgcctgcttgacgtcaaatccggatgaggagacctaccataaggtgaccggcggcatcctgcagccgaccatcgacttcgcagcgtctggccaaggcaggcaagaagatctgggtgcgtttcgtgctcgtgccgggccacatcctccgaagaaaacgtcgagaacgtggcgaagatctgcgagaccttcggcgacgttggaacatatcgacgtattgcccttccaccagcttggccgtccgaagtggcacatgcaacatcccatacccgttggaggaccagaaaggcccgtccgcggcaatgaaacaacgtggtcgagcagttccagtcgcacggcttcaccgtgtactaa

SEQ ID NO: 40 - protein, 292 aa, Bifidobacterium adolescentis
MSEHIFRSTTRHMLRDSKDYVNQTLMGGLSGFESPIGLDRLDRIKALKSGDIGFVHSWDINTSVDGPGTRMTVFMSGCPLRCQYCQNPDTWKMRDGKPVYYEAMVKKIERYADLFKATGGGITFSGGESMMQPAFVSRVFHAAKQMGVHTCLDTSGFLGASYTDDMVDDIDLCLLDVKSGDEETYHKVTGGILQPTIDFGQRLAKAGKKIWVRFVLVPGLTSSEENVENVAKICETFGDALEHIDVLPFHQLGRPKWHMLNIPYPLEDQKGPSAAMKQRVVEQFQSHGFTVY

SEQ ID NO: 41 - DNA, 854 bp, Bifidobacterium longum
atgcccgcaacacccacgttccgcaccacgaccaggcatatgctcaaggaatcgaagatatgcctcgcagactttgatgggcggcctttccggctttgaatccccaatcggactcgcgacgtgaccgcctttccgccctgaaatccggcgatatcggcttcgtccactcttgggatcaacacctccgtggacggaccgggcacccgtatgaccgtgttcatgtccggctgccctgcgctgccagtactgccagaacccggacacttggaagatgcgcgacggcaagcccgtaccttgacgccatgatcaagaaggtcgatcgttacaaggacctgttcaaggccacgcggcggtatcaccttctccggcggcgaatccatgatgcagcccgccttcgtctcgcgtgttccatgccgccaaggagatgggcgtgcacacctgcctcgacacgtccggcttcctcaacgaattacaccgacgagatgctcgaggacatcgacctgtgtctgctcgacgtcaaatggcgacgaggagacctatcacaaggtcaccggcggcaccttgcagcccaccatcgattggccagcgactggccaaggccggcaagaagatctgggtgcgatttgtgctcgtgccggctgaccgactccgaagagaacgtcgaaaacgtggcgaagatctgcgagtccttcggcggccgtcgaacacatcgacgtgctgggattccaccagcttggccgcccgaagtggcacgctgcgcatcccatacccgctggagaaccagaagggacccaacgccgccacccgcgaacgtggccaaccagttcaaggaccacggcttcaccgtgtattaa

SEQ ID NO: 42 - protein, 293 aa, Bifidobacterium longum
MPATPTFRTTTRHMLKESKTYASQTLMGGLSGFESPIGLDRRDRLSALKSGDIGFVHSWDINTSVDGPGTRMTVFMSGCPLRCQYCQNPDTWKMRDGKPVYLDAMIKKVDRYKDLFKATHGGITFSGGESMMQPAFVSRVFHAAKEMGVHTCLDTSGFLNTNYTDEMLEDIDLCLLDVKSGDEETYHKVTGGTLQPTIDFGQRLAKAGKKIWVRFVLVPGLTDSEENVENVAKICESFGDAVEHIDVLGFHQLGRPKWHELRIPYPLENQKGPNAATRERVANQFKDHGFTVY

SEQ ID NO: 43 - DNA, 854 bp, Bifidobacterium longum
atgcccgcaacacccacgttccgcaccacgaccaggcatatgctcaaggaatcgaagatatgcctcgcagactttgatgggtggcctttccggctttgaatccccaatcggactcgcgacgtgaccgcctttccgccctgaaatccggtgatatcggcttcgtccactcttgggatcaacacctccgtggatggaccgggcacccgcatgaccgtgttcatgtccggctgccctgcgctgccagtactgccagaacccggacacttggaagatgcgcgacggcaagcccgtaccttgacgccatgatcaagaaggtcgatcgttacaaggacctgttcaaggccacgcggcggtatcaccttctccggcggcgaatccatgatgcagcccgccttcgtctcgcgtgttccatgccgccaaggagatgggcgtgcacacctgcctcgatacgtccggcttcctcaacgaattacaccgacgagatgctcgaggacatcgacctgtgtctgctcgacgtcaaatggcgacgaggagacctatcacaaggtcaccggcggcaccttgcagcccaccatcgattggccagcgactggccaaggccggcaagaagatctgggtgcgatttgtgctcgtgccggctgaccgactccgaagagaacgtcgaaaacgtggcgaagatctgcgagtccttcggtggccgtcgaacacatcgacgtgctgggattccaccagcttggccgcccgaagtggcacgctgcgtatcccatacccgctggagaaccagaagggacccaacgccgccacccgcgaacgtgaccaaccagttcaaggaccacggcttcaccgtgtattaa

SEQ ID NO: 44 - protein, 293 aa, Bifidobacterium longum
MPATPTFRTTTRHMLKESKTYASQTLMGGLSGFESPIGLDRRDRLSALKSGDIGFVHSWDINTSVDGPGTRMTVFMSGCPLRCQYCQNPDTWKMRDGKPVYLDAMIKKVDRYKDLFKATHGGITFSGGESMMQPAFVSRVFHAAKEMGVHTCLDTSGFLNTNYTDEMLEDIDLCLLDVKSGDEETYHKVTGGTLQPTIDFGQRLAKAGKKIWVRFVLVPGLTDSEENVENVAKICESFGDAVEHIDVLGFHQLGRPKWHELRIPYPLENQKGPNAATRERVTNQFKDHGFTVY

SEQ ID NO: 45 - DNA, 873 bp, Bifidobacterium animalis
atgtcgaattcagagtcgaatcacggtgcatccgcattccgcaccacgacgcggcacactcaagtcgtcgaaggagtaccagcgcaagacgctcatgggcggtctgtcaggattcgtcgcccatcggactcgatcggcgtgaccgcatcaatgcgttgaaaaccggcgacatagtttgtgcattcctgggacatcaatacgtcggtggacggcccgggcacccgcatgacggttcctgagcggctgcccactgcgctgccagtactgccagaaccccgacacctggaagacgcgacggcaagccggtgtacctcgatgccatggtggtcaagatcgaacggtacaaggctgttcgaagccacgaaaggcggcatcaccttctcgggcggcgagtccatgatgcagcgcattcgtgtcgcgggtgttccgggcggccaaggagatgggtgtgcacacctgccttgacttcgggcttcctcaacgccaactattcggatgaaatgatcgacgacatcgatctgtctgctcgatgtgaagtccggagacgaggagacctacaagcgggtaaccgggggagtgccagcccaccatcgatttcggacagcggttgaacaggaggggcaagaagatctgggtgcttcgtgctggttcccgggctcacctcgtcggaggagaacgtggagaatgtggcccgcatgtgagagcttcggcgacgcggtggagcatatagacgtgctgccgttccaccagctcgcgtccgaagtggcatgagctgcgaatcccttacccgttggaggaccagaagggaccttcaggcgttgcgcgaccgcgtgcgccagcagttcgagagccacggattcacggtctacgtaa

SEQ ID NO: 46 - protein, 300 aa, Bifidobacterium animalis
MSNSESNHGASAFRTTTRHMLKSSKEYQRKTLMGGLSGFESPIGLDRRDRINALKTGDIGFVHSWDINTSVDGPGTRMTVFLSGCPLRCQYCQNPDTWKMRDGKPVYLDAMVVKIERYKDLFEATKGGITFSGGESMMQPAFVSRVFRAAKEMGVHTCLDTSGFLNANYSDEMIDDIDLCLLDVKSGDEETYKRVTGGVLQPTIDFGQRLNRRGKKIWVRFVLVPGLTSSEENVENVARICESFGDAVEHIDVLPFHQLGRPKWHELRIPYPLEDQKGPSQALRDRVRQQFESHGFTVYV

SEQ ID NO: 47 - DNA, 696 bp, Clostridium cellulolyticum
atggagattaaagggaggatacattcatttgagacatttgggaccgtggacggtcccgattagatttattgtgtttctgaagggctgcccgcttcgctgtaagtactgccacaacagatgcatggagttcagagggtgcaaaactgtacagtcctcaagaggtgttgaaggaaacagaaatacaggaattttatagatgcctctcatggaggaataacagtcagcgggggagcctttaattcagcatgaatttgtaaaggaactatttaaattatgtcgtgaagctgggacataccgctgtggacacttccggctacgtcaatgtggaagatgtaaaggacacactagtatacagaccttgttcttcttgatttaaagcaggcaaatgcacagaagcatttggaatacaggagtggagaataagcgtatcaagctgtttacaacctacctgggtgaaatcggaacctgtttggataagatatgtgcttataccgggttatacagatggtgaagaggatttgcgcagcatacaattatttaaagggatttaaaaatatagagaaaatagaggttcttccatcacataatgggaaaggcaaaatgggagaagctgaacgtacaatatcccctggagggagccttcccctacacaggaagaggtggacagggccaaaaacatcctgactacaggaaaac

SEQ ID NO: 48 - protein, 240 aa, Clostridium cellulolyticum
MEIKGRIHSFETFGTVDGPGIRFIVFLKGCPLRCKYCHNRDAWSSEGAKLYSPQEVLKEIQKYRNFIDASHGGITVSGGEPLIQHEFVKELFKLCREAGIHTAVDTSGYVNVEDVKDTLEYTDLVLLDLKQANAQKHLELTGVENKRIKLFTTYLGEIGKPVWIRYVLIPGYTDGEEDLLAAYNYLKGFKNIEKIEVLPYHIMGKAKWEKLNVQYPLEGVPSPTQEEVDRAKNILTTGKP

SEQ ID NO: 49 - DNA, 717 bp, Escherichia coli
atgtcagttattggtcgcattcactcctttgaatcctgtggaaccgtagacggcccagattcgctttatcacctttttccagggctgcctgatgcgctgcctgtattgtcataaccgacacctgggacacgcatggcggtaaagaagttaccgttgaagatttgatgaaggaaggtgacctatcgccactttatgaacgcttccggcggcggcgttaccgcatccggcggtggcaatcctgcaagctgagtttgttcgtgactggttccgcgcctgcaaaaaagaaggcacatacctgtctggacaccaacggttttgttcgtcgttacgatccggtgattgatgaacctggaagtaaccgacctggtaatgctcgatctcaaacagatgaacgacgagatccaccaatctggttggagtttccaaccaccgcacgctggagttcgctaaatatctggcgaacaaatgtgaaggtgtggatccgctacgttgttgtcccaggctggtctgacgatgacgattgcgcatcgcctcggtgaatttacccgtgatatgggcaacgttgagaaaatcgagcttcccctaccacgagctgggcaaacacaaatgggtggcaatgggtgaagagtacaaactcgggtgttaaaccaccgaagaaagagaccatggaacgcgtgaaaggcattcttgagcagtggtcataaggtaatgttctaa

SEQ ID NO: 50 - protein, 246 aa, Escherichia coli
MSVIGRIHSFESCGTVDGPGIRFITFFQGCLMRCLYCHNRDTWDTHGGKEVTVEDLMKEVVTYRHFMNASGGGVTASGGEAILQAEFVRDWFRACKKEGIHTCLDTNGFVRRYDPVIDELLEVTDLVMLDLKQMNDEIHQNLVGVSNHRTLEFAKYLANKNVKVWIRYVVVPGWSDDDDSAHRLGEFTRDMGNVEKIELLPYHELGKHKWVAMGEEYKLDGVKPPKKETMERVKGILEQYGHKVMF

SEQ ID NO: 51 - DNA, 2152 bp, Bacillus licheniformis
atggaacaatggaaaggtttcaccacaaacgtttggcaaaaagaagtcaatgtccgcgtttattctctcgaactttgagccatatcaaggtgacgaatcgtttctcgaacctccgagaagctacatcggcattatgggatcatgtaatggatttgacaaaaaaagagcgtgaaaggaggcgtccttgatatggatacagagatcgtctcaacgatcacctcgcacggtcccgtatttgaacaaagacctggaaaaagtcgtcggcgttcaaaccgatgagccgtttaaactcgcttcagcctttcggcggcatccgaatggcaaagcaggcatgcgaatcctatggttaaactgaatgaagaagtggaaaggatctttaccgattaccgcaaaactcataaccaaggtgtttgacgcatatacggacgaaatgaagctcgcccgaaaagtcggaatcattaccgctgcctgatgcttacgggcgcgggcgcatcatcggtgattaccggagagtggcgctttggcgtggatttcttgatcgatgaaaagaaaaaagatgcggccggcacctctcgggtgatctgaagaaaacatccgccttcgtgaagaactgtcagaacaaatccgagcattgaacgcttaaagcgcttgcaaaaagctatgggtttgacatttccaagcctgcggcgaatgcaagaagcatttcaatggctgtattttgcctatttggctgccattaaagagcaaaacggaggcaatgagccttggccgcgtgtccacgttccttgatatttacatcgaaagagatttgaacgggcgtattaacagagcgtgaagcccaagagcttgtcgaccatttcgtcatgaagccgtttggtcaaattcgcgcgcacacctgactacaatgaactgttcagcggcgatccgatgggtgacagaatcaatcggcggaatggcgcacgacggacgcgccctggtgacgaaaatcgttccgtttcctgcatacgcttgacaatttaggcccggcgcctgaaccgaatttaagttctttggtctgtcagactgccgcaaaagtttaaaaactactgtgccaaaatgtcgaaaaacaagctcgatccaatacgaaaatgacgatatcatgcgtccagaatacggtgatgtacggaatcgcctgctgtgtatcggcaatggcaatcggcaaacaaatgcagttcttcggcacgcgccaacttggcgaaagctcttttatatgcgattaacggcggaaaagacgaaacataaaatgcaagtcggtccggaaatgccgccggttgcttccgacgtgctggactatggaagtgatgcataaattcgatcagacgatggaatggctcgcaggcttgtacatcaacactcaatgtcattcactacatgcatgataaatattgctatgaaagaattgaaatggccccacgacacggaaattttgcggacgatggccactgggatcgccggcttgagtgttgtcggattcattaagcgctgtcaaatatgccaaagtcagcgtggtccgcgatgaaaacggcagcggtcgattttgaaacagaaggcgactttcctaagtacggaaataacgatgaccgcggacgcgatcgccgttgacattgtcaagcgctttatgaaaaaactgcgcaagcatcagatatcgccagtccgttcagaccatgtcaattttaacgatcacgtcaaacgtcgtttacgaagaaaaccggaaatacgccggatggacgccgcgcgggagaaccgtttgctccaggtgaatccgatgcacggccgcgatactaaagggacgcttgcatcgctgtcttcagtggcaactgccttacagctatgcgctcgacggcatttccaacaccttttcaatcgtcccgaaagcttggcaaagacgaagagagccgcgccgccaatttgtcaagcatccttgacggatatggcaaaaacaggacatcacttaaatgtaaacgtatttaacagagagacactgctcgacgatggaacatccagaggaatatccgcagttaacgattcgcgtctcaggctatgcggtcatttattaagctgacgaaagaacagcagttagacgtcatcagcagaaccttccatgaatatgtag

SEQ ID NO: 52 - protein, 741 aa, Bacillus licheniformis
MEQWKGFTTNVWQKEVNVRDFILSNFEPYQGDESFLEPPTEATSALWDHVMDLTKKERENGGVLDMDTEIVSTITSHGPGYLNKDLEKVVGVQTDEPFKRSLQPFGGIRMAKQACESYGFKLNEEVERIFTDYRKTHNQGVFDAYTDEMKLARKVGIITGLPDAYGRGRIIGDYRRVALYGVDFLIDEKKKDAAGTSRVMSEENIRLREELSEQIRALNELKALAKSYGFDISKPAANAREAFQWLYFAYLAAIKEQNGAAMSLGRVSTFLDIYIERDLKTGVLTEREAQELVDHFVMKLRLVKFARTPDYNELFSGDPTWVTESIGGMAHDGRALVTKNSFRFLHTLDNLGPAPEPNLTVLWSVRLPQKFKNYCAKMSIKTSSIQYENDDIMRPEYGDDYGIACCVSAMAIGKQMQFFGARANLAKALLYAINGGKDEKHKMQVGPEMPPVASDVLDYDEVMHKFDQTMEWLAGLYINTLNVIHYMHDKYCYERIEMALHDTEILRTMATGIAGLSVVADSLSAVKYAKVSVVRDENGIAVDFETEGDFPKYGNNDDRVDAIAVDIVKRFMKKLRKHQTYRQSVQTMSILTITSNVVYGKKTGNTPDGRRAGEPFAPGANPMHGRDTKGTLASLSSVAKLPYSYALDGISNTFSIVPKALGKDEESRAANLSSILDGYAAKTGHHLNVNVFNRETLLDAMEHPEEYPQLTIRVSGYAVNFIKLTKEQQLDVISRTFHESM

SEQ ID NO: 53 - DNA, 2152 bp, Bacillus licheniformis; identical to SEQ ID NO: 51

SEQ ID NO: 54 - protein, 741 aa, Bacillus licheniformis; identical to SEQ ID NO: 52

SEQ ID NO: 55 - DNA, 2234 bp, Streptococcus thermophilus
atggcaacggttaaaactaacacagatgtttttgaaaaagcgtgggaaggctttaaagactgactggaaagaaaaagcaagtgtgtctcgcttcgtacaagcaaactacacaccatgatggtgatgaaagcttccttgcaggaccaactgaacgctcacttaaaatcaaaaaaaattgaagaaactaaagcccactacgaagaaactcgtttcccaatggatactcgtccgatcaatcgcagatattcctgccggctatatttcaaaagacgacgaactaatctacggtacaaaatgatgagttattcaaattgaatttcatgccaaaaggcggaattcgtatggcagacagctctcaaggaacatggctatgaacctgatccagctgttcacgaaatttttacaacatgtaactacagtaaatgacggtatcttccgtgcttatacatcaaatatccgtcgtgcgtcacgcacacactataactggacttccagatgcttactctcgtggacgtatcatcggtttatgctcgccttgctctttacggtgctgacttcttgatgcaagaaaaagtaaacgtggaactctatcgaagaaatcaacgaagaaactattcgtcttcgtgaagaagttaacccaataccaagcacttcaagatgttgttcgccttggtgacctttacggtgtagatgttccgtccagccttcgatactaaagaagctatccaatggacaaacattgcttttatggctgtgtcgtgttatcaatggtgcggctacttcacttggtcgtgtgccaatcgtccttgacatatgcagaacgtgaccttgctcgtggtacttacactgaatcagaaatccaagaattcggatgattttgtcttgaaacttcgtactgtaaaattcgcacgtacaaaagcttacgacgctttactcaggtgacccaacattcatcacaacttctatggctggtatgggtgctgacgcgtcaccgtgttactaaaatggactaccgtttcttgaacacacttgataatattggtagctccagaaccaaacttgacagttctttggtctgacaaattgccttactcattccgtctactgtatgcacatgagtcacaagcactcttctattcaatacgaaggtgtgactactagctaaagacggatacggtgaaatgagctgtatctcatgttgtgtatcaccacttgaccgaaaacgaagaacaacgccacaacatccaatacttcggtgctcgtgttaacgtacttagcccttcttactggtttgaacggtggttacgacgatgttcataaagactacaaagtatgacatcgatccagtccgtgatgaagttcttgactttgacactgttaaagctaacttcgaaatctcttgactggttgactgacacttatgtagatgcccttaacatcatccactacaactgataagtacaactacgaagctgttcaaatggccttcttgccaactaaacaacgtgaacatgggattcggtatctgtggtttcgcaaatactgttgatacattgtcagctatcatacgctacagttaaaccaatccgtgacgaagatggctacatctacgactacgaaacaaggtgaatacccacgttggggtgaagatgacccacgttcaaacgaattggcagaatggtattgaagcttacactactcgtcttcgtagccataaactctacaaagatgcagaagctagtttcacttcttacaatcacttcgaacgttgcttactctaaacaaactggtaactctcgttcacaaaggggtatacctcaacgaagatggttcagtgaacttgtccaaattggaatttctcaccaggtgctaacccatctaacaaagctaaaggtggatggttgcaaaacttgatcacttgcaagccttgacttcggttatgcagctgacggtatctcacttactactcaagtcacctcgtgcccttggtaagactcgcgacgaacaagttgataacctcgtaactatccgacggatacttcgaaaacggtggacaacaccttaacttgaacgttatggacttgtcaggtttacaaaaagatcatgagcggtgaagatgttatcgtacgtatctctggatactgtgaacactaaatacctcactccagaacaaaaaactgaattgacacaacgtgtcttccacggttctttcaacggacgatgctatgggataa

SEQ ID NO: 56 - protein, 769 aa, Streptococcus thermophilus
MATVKTNTDVFEKAWEGFKGTDWKEKASVSRFVQANYTPYDGDESFLAGPTERSLKIKKIIEETKAHYEETRFPMDTRPTSIADIPAGYISKDDELIYGIQNDELFKLNFMPKGGIRMAETALKEHGYEPDPAVHEIFTKHVTTVNDGIFRAYTSNIRRARHAHTITGLPDAYSRGRIIGVYARLALYGADFLMQEKVNDWNSIEEINEETIRLREEVNLQYQALQDVVRLGDLYGVDVRRPAFDTKEAIQWTNIAFMAVCRVINGAATSLGRVPIVLDIYAERDLARGTYTESEIQEFVDDFVLKLRTVKFARTKAYDELYSGDPTFITTSMAGMGADGRHRVTKMDYRFLNTLDNIGNAPEPNLTVLWSDKLPYSFRRYCMHMSHKHSSIQYEGVTTMAKDGYGEMSCISCCVSPLDPENEEQRHNIQYFGARVNVLKALLTGLNGGYDDVHKDYKVFDIDPVRDEVLDFDTVKANFEKSLDWLTDTYVDALNIIHYMTDKYNYEAVQMAFLPTKQRANMGFGICGFANTVDTLSAIKYATVKPIRDEDGYIYDYETIGEYPRWGEDDPRSNELAEWLIEAYTTRLRSHKLYKDAEATVSLLTITSNVAYSKQTGNSPVHKGVYLNEDGSVNLSKLEFFSPGANPSNKAKGGWLQNLNSLASLDFGYAADGISLTTQVSPRALGKTRDEQVDNLVTILDGYFENGGQHLNLNVMDLSAVYKKIMSGEDVIVRISGYCVNTKYLTPEQKTELTQRVFHEVLSTDDAMG

SEQ ID NO: 57 - DNA, 2234 bp, Streptococcus thermophilus
atggcaacggttaaaactaacacagatgtttttgaaaaagcgtgggaaggctttaaagactgactggaaagaaaaagcaagtgtgtctcgcttcgtacaagcaaactacacaccatgatggtgatgaaagcttccttgcaggaccaactgaacgctcacttaaaatcaaaaaaaattgaagaaactaaagctcactacgaagaaactcgtttcccaatggatactcgtccgatcaatcgcagatattcctgccggctatatttcaaaagacgacgaactaatctacggtacaaaatgatgagttattcaaattgaatttcatgccaaaaggcggaattcgtatggcagacagctctcaaggaacatggctatgaacctgatccagctgttcacgaaatttttacaacatgtaactacagtaaatgacggtatcttccgtgcttatacatcaaatatccgtcgtgcgtcacgcacacactataactggacttccagatgcttactctcgtggacgtatcatcggtttatgctcgccttgctctttacggtgctgacttcttgatgcaagaaaaagtaaacgtggaactctatcgaagaaatcaacgaagaaactattcgtcttcgtgaagaagttaacccaataccaagcacttcaagatgttgttcgccttggtgacctttacggtgtagatgttccgtccagccttcgatactaaagaagctatccaatggacaaacattgcttttatggctgtgtcgtgttatcaatggtgcggctacttcacttggtcgtgtgccaatcgtccttgacatatgcagaacgtgaccttgctcgtggtacttacactgaatcagaaatccaagaattcggatgattttgtcttgaaacttcgtactgtaaaattcgcacgtacaaaagcttacgacgctttactcaggtgacccaacattcatcacaacttctatggctggtatgggtgctgacgcgtcaccgtgttactaaaatggactaccgtttcttgaacacacttgataatattggtagctccagaaccaaacttgacagttctttggtctgacaaattgccttactcattccgtctactgtatgcacatgagtcacaagcactcttctattcaatacgaaggtgtgactactagctaaagacggatacggtgaaatgagctgtatctcatgttgtgtatcaccacttgaccgaaaacgaagaacaacgccacaacatccaatacttcggtgctcgtgttaacgtacttagcccttcttactggtttgaacggtggttacgacgatgttcataaagactacaaagtatgacatcgatccagtccgtgatgaagttcttgactttgacactgttaaagctaacttcgaaatctcttgactggttgactgacacttatgtagatgcccttaacatcatccactacaactgataagtacaactacgaagctgttcaaatggccttcttgccaactaaacaacgtgaacatgggattcggtatctgtggtttcgcaaatactgttgatacattgtcagctatcatacgctacagttaaaccaatccgtgacgaagatggctacatctacgactacgaaacaaggtgaatacccacgttggggtgaagatgacccacgttcaaacgaattggcagaatggtattgaagcttacactactcgtcttcgtagccataaactctacaaagatgcagaagctagtttcacttcttacaatcacttcgaacgttgcttactctaaacaaactggtaactctcgttcacaaaggggtatacctcaacgaagatggttcagtgaacttgtctaaattggaatttctcaccaggtgctaacccatctaacaaagctaaaggtggatggttgcaaaacttgatcacttgcaagccttgacttcggttatgcagctgacggtatctcacttactactcaagtcacctcgtgcccttggtaagactcgcgacgaacaagttgataacctcgtaactatccgacggatacttcgaaaacggtggacaacaccttaacttgaacgttatggacttgtcaggtttacaaaaagatcatgagcggtgaagatgttatcgtacgtatctctggatactgtgaacactaaatacctcactccagaacaaaaaactgaattgacacaacgtgtcttccacggttctttcaacggacgatgctatgggataa

SEQ ID NO: 58 - protein, 769 aa, Streptococcus thermophilus; identical to SEQ ID NO: 56

SEQ ID NO: 59 - DNA, 2234 bp, Streptococcus thermophilus
atggcaacggttaaaactaacacagatgtttttgaaaaagcgtgggaaggctttaaagactgactggaaagaaaaagcaagtgtgtctcgcttcgtacaagcaaactacacaccatgatggtgatgaaagcttccttgcaggaccaactgaacgctcacttaaaatcaaaaaaaattgaagaaactaaagctcactacgaagaaactcgtttcccaatggatactcgtccgatcaatcgcagatattcctgccggctatatttcaaaagacgacgaactaatctacggtacaaaatgatgagttattcaaattgaatttcatgccaaaaggcggaattcgtatggcagacagctctcaaggaacatggctatgaacctgatccagctgttcacgaaatttttacaacatgtaactacagtaaatgacggtatcttccgtgcttatacatcaaatatccgtcgtgcgtcacgcacacactataactggacttccagatgcttactctcgtggacgtatcatcggtttatgctcgccttgctctttacggtgctgacttcttgatgcaagaaaaagtaaacgtggaactctatcgaagaaatcaacgaagaaactattcgtcttcgtgaagaagttaacccaataccaagcacttcaagatgttgttcgccttggtgacctttacggtgtagatgttccgtccagccttcgatactaaagaagctatccaatggacaaacattgcttttatggctgtgtcgtgttatcaatggtgcggctacttcacttggtcgtgtgccaatcgtccttgacatatgcagaacgtgaccttgctcgtggtacttacactgaatcagaaatccaagaattcggatgattttgtcttgaaacttcgtactgtaaaattcgcacgtacaaaagcttacgacgctttactcaggtgacccaacattcatcacaacttctatggctggtatgggtgctgacgcgtcaccgtgttactaaaatggactaccgtttcttgaacacacttgataatattggtagctccagaaccaaacttgacagttctttggtctgacaaattgccttactcattccgtctactgtatgcacatgagtcacaagcactcttctattcaatacgaaggtgtgactactagctaaagacggatacggtgaaatgagctgtatctcatgttgtgtatcaccacttgaccgaaaacgaagaacaacgccacaacatccaatacttcggtgctcgtgttaacgtacttagcccttcttactggtttgaacggtggttacgacgatgttcataaagactacaaagtatgacatcgatccagtccgtgatgaagttcttgactttgacactgttaaagctaacttcgaaatctcttgactggttgactgacacttatgtagatgcccttaacatcatccactacaactgataagtacaactacgaagctgttcaaatggccttcttgccaactaaacaacgtgaacatgggattcggtatctgtggtttcgcaaatactgttgatacattgtcagctatcatacgctacagttaaaccaatccgtgacgaagatggctacatctacgactacgaaacaaggtgaatacccacgttggggtgaagatgacccacgttcaaacgaattggcagaatggtattgaagcttacactactcgtcttcgtagccataaactctacaaagatgcagaagctagtttcacttcttacaatcacttcgaacgttgcttactctaaacaaactggtaactctcgttcacaaaggggtatacctcaacgaagatggttcagtgaacttgtctaaattggaatttctcaccaggtgctaacccatctaacaaagctaaaggtggatggttgcaaaacttgatcacttgcaagccttgacttcggttatgcagctgacggtatctcgcttactactcaagtcacctcgtgcccttggtaagactcgcgacgaacaagttgataacctcgtaactatccgacggatacttcgaaaacggtggacaacaccttaacttgaacgttatggacttgtcaggtttacaaaaagatcatgagcggtgaagatgttatcgtacgtatctctggatactgtgaacactaaatacctcactccagaacaaaaaactgaattgacacaacgtgtcttccacggttctttcaacggacgatgctatgggataa

SEQ ID NO: 60 - protein, 769 aa, Streptococcus thermophilus; identical to SEQ ID NO: 56

SEQ ID NO: 61 - protein, 2365 aa, Lactobacillus plantarum
ATGATCATGTCTGAAACTTTAACTAAAACAACGACAACTATTAACCACTTCGGTAAATACGCCAATGATGGATCGCTTACGCGATAGCATCATTGATGCAAAACCTTATGTCGATCGAACGGGCGATTCTCACAACCGAAACTTATCGACAACACCAAGACGAACAAGTCGATATTACGGGCTAAAATGCTTGAACACGTTCTTGATAAAATGAGTATCTTCATTGAAGATGACTTTAATTGTTGGTAACCAAGCACGCCAAAATCGTTGGGCACCAGTATTCCCTGAGTTCTATGAATTGGGTCATTGATGAATTAGATACATTTGAGAAGCGTCCTGGTGACGTTTTATATTACGGAGAAATCCAAGGAAGAACTTCGTGCGATTGCGCCTTTCTGGAAACATAACCTTGGAAGACCGCGGCTACGCTAGTTTTCCAGAAGCAAGTCGTATTTTTTATGATTGGTATTATTGGAGCCGATGGTAATATCACTTCTGGTGATGGTCACATTGCGGTCGACTAAAAACGTTGTTAATAAGGGACTTAAATGGTATGAAGACCGCATTAAGACAGCACTTGAATCTTGACCTTACTGATTTTAACCAGCAAAAACAATACTATTTCTATAAAGCGGGCCATTGTAATTGATGCCATTCACAATTTTGCTAAACGTTACGCCCAATTAGCGTCCAAGCGCTCAAAACACGACATCCGCAACTCGCAAAGCACAACTTGAAAAAATCGCCCAAATTCAACAAGGTTCCTTACGAACCTGCAAATTCATTTTATGAAGCGATTCAAGCTGTCTGGTGTTCATCTGACCTTACAAATCGAATCCAACGGTCATTCTGTCTCATATGGTCGTCTAGCAGTACCTAGCTCCATTCTATGAGCACGATTTAAAAACTGGTGCTATTGACGCCAACGGCAACCGAATTACTCACAAACTTATGTCTTAAGACGTTAACGATTAATAAAGTACGCTTGGCAACATACTGAATTTTCTGCAGGGAGTCCCCTCTACCAAAACATTACGATTGGTGCAAACACCAGATGGTAAAGATGCCGTTAATCCGACGTCCTATCTGATTTTACGAGCAAGCGCAAGCACATTTACCACAACCCAACTTAACGGTCCGTTATCACCATGGCTTAAGCGAAGTTTATGCGTGAATGTGTCGAAGTTATTAAACAAGGCTTAGGTATGCCTGCGTTTAAACGACGAAATTATTATTCCGTCGTTTATTCGTCGTGGCGTCAAGAAAGAAGACGCCTAATTACAGTGCCATCGGTTGTGTCGAAACAGCGATCCCTGGAAAATGGGGCTATCGTTACCGGGATGAGCTTCATTAACTTCCCACGCGTTCTCTTACTCATTATGAATGGTGGCAGATCCTGAATCTGGCAAACGGTTATTACCCGATTATGGTAAGTTCACTGATATGACTTTTTGATCAACTTATGACTGCTTGGGACAAAGCGCTCCGTGAAATGACACGACAAAGTGATTATCGAAAATAGTTGTGATTTGGCTTTGGAACAAAATTATCCTGATATTCTCTGCTGTTTTAACCGACGATTGTATCGGTCGTGGTAAGACCATTAAAGAAGGTGGCGCGGTATGACTTTATCAGTGGATTACAAGTTGGTATTGCTAACCTAGCGGACTCCCTAGCTGCAAAAGAAACTTGTCTTTGAAGAAAAGAAGTTGACAACAACCCAACTTTGGCACGCACTTAACTGATTTTGCGGATGAAGATGGTGAAAAGATTCGGCAGATGCTCATTAATGATGCCCAAGTATGGTAACGATGATGATTATGTTGATGATTTGATTGTTGAAGCTTATAAACCATATTGATGAAATTGCCAAGTACAAAAACACGCGCTACGGTCGCGGCCCTATTGGTGGCTCGCTACGCAGGAACCTCTTCTATTTCGGCCAACGTTGGTCAAGGGCACAGCACTTTGGACACCAGATGGTCGGCACGCTCGGACACCATTAGCCGAAGGTTGCTCACCAGAACATGATGGATACTGATGGCCCAACTGCTGTGTTCAAATCAGTTTCCAAATTATCCACTAAGGATCACTGGTGGCGTATTACTGAACCAAAAGATGTCACCACAAATTCTACGGAGTGATGAGCTGCATGAAATTGGTTGCACTACTACGGACCTTCTTCAATCGACTTCATGGTTACCGTCCAATACAACATTGTTTCACGGGATACCTTGATTGATGCACAGAACCATCCTGACACACCGTGACTTGATTGTTCGGGTTGCTGGATATTCCGCCTTCTTCGTGGGCCTATCCAGAAACCCAAGATGATATTATCGAACGGACGGAGCAGTCTCTATAA

SEQ ID NO: 62 - protein, 814 aa, Lactobacillus plantarum
MIMSETLTKTTTTINHFGKLTPMMDRLRDSIIDAKPYVDPERAILTTETYRQHQDEQVDILRAKMLEHVLDKMSIFIEDDTLIVGNQARQNRWAPVFPEYSMNWVIDELDTFEKRPGDVFYITEKSKEELRAIAPFWKHNTLEDRGYASFPEASRIFYDLGIIGADGNITSGDGHIAVDYKNVVNKGLKWYEDRIKTALANLDLTDFNQQKQYYFYKAGLIVIDAIHNFAKRYAQLASKQAQNTTSATRKAQLEKIAQILNKVPYEPANSFYEAIQAVWLVHLTLQIESNGHSVSYGRLDQYLAPFYEHDLKTGAIDANGATELLTNLCLKTLTINKVRSWQHTEFSAGSPLYQNITIGGQTPDGKDAVNPTSYLILRAIAQAHLPQPNLTVRYHHGLSDKFMRECVEVIKQGLGMPAFNNDEIIIPSFIRRGVKKEDAYNYSAIGCVETAIPGKWGYRCTGMSFINFPRVLLLIMNGGIDPESGKRLLPDYGKFTDMTSFDQLMTAWDKALREMTRQSVIIENSCDLALEQNYPDILCSVLTDDCIGRGKTIKEGGAVYDFISGLQVGIANLADSLAAIKKLVFEEKKLTTTQLWHALTTDFADEDGEKIRQMLINDAPKYGNDDDYVDDLIVEAYKPYIDEIAKYKNTRYGRGPIGGLRYAGTSSISANVGQGHSTLATPDGRHARTPLAEGCSPEHAMDTDGPTAVFKSVSKLSTKDITGGVLLNQKMSPQILRSDESCMKLVALLRTFFNRLHGYHVQYNIVSRDTLIDAQNHPDKHRDLIVRVAGYSAFFVGLSKETQDDIIERTEQSL

SEQ ID NO: 63 - DNA, 2185 bp, Lactobacillus plantarum
atgattacatcagaaaagacaacaaaaccagcagcttggaaaggtttcaaaggcgggctggcaggaagaaatcaacattcgtgattttattcaaaataacttcacacagtacaatggacgaaagcttcctggccggaccaacagccgctactaagaccttgaatgacaaagtctgaattaaagaaacaagaacgtgccgctggtggtgtgttggatgctgatactaaagtcggcaacgattacttcacacggccctggttatattcaaaaagatctcgaaaagattgttgctccagactgacaagcctttgaagcgggccttcatgccatttggtggtattcgaatgggatgacgctttgaaatcatacggttatacccctgatgaagaaaacgacaagattttcagaatatcgcaagactcataaccaaggcgtcttcgatgtttatactcctgacatgcggagcacgtcactacaagatcatcaccggactaccagatgcatacgcacgtggccgtctcacctgatcttccacgggtcgctgtttatgggatcgatcgtttaatggaagacaaagctagactttgcccacattggtgatggtgaattgactgatgatgttattcgcctccgtgaaggttcaagatcaataccgtgctttagcagatatgaagaagatggctgccagttatggctgatattagcaagcctgcaactaatgctcaagaagctattcaatggatgtacttcgcttttagctgctatcaagacccaaaacggcgctgcaatgtccgttggccggattgatacaaatggacatcttcatccaacgtgacttggacaatggtgttctggacgaaagccaagctcgaattaattgatcaattcgtcatgaaactacggatggttcggttcatccgtactgaagtacaattctctcttctctggtgacccaatctgggcaaccttatcaatgtgtggtttaggtcgacggtcaacaccatgtgactaagactgctttccggattttaaagactttggacaatgggcgccgcaccagaaccaaacatcacgattttatggtcagaccgcttaccagaagttcaaacgttacgcaactgaagtttcaatcgacagttcaaccattcagtatgaaaatggacttgatgcgggtacaatggggtaccgattattatggcattgcttgctgtgtttccgcaaccaattgctgatggaatccagtacttcggtgcccgggcaaacttagccaaagcgactttatgccatcaatggtggccgcgacgaaattgctggagatcaagttggccctgcttgaaccaattacttcagaatacatcgattacgacgaattcatgaagaaattagacaagcatggattggttagctgacacttacgttaactcactgaatgcaattcattatatgcatgaagtactactatgaagctgcccaattagctttgaagaatactgatcttgatcggacctgcaactgggatttctggcttatcacatgccgcggattcaatctcagctatcaagtatgcacgttaaagtaattcgtgacgaacgtggtatcgccgttgacttcaaagccgacaatgtacccacgttatgggaacaatgacgatcgcgctgatgacattgctaaatggttagtcagaattatacagcaagatgaacacgcatcacctctatcggaatgccaaactttcaacttgttttgacgattacctccaacgttgtttatggtaagaacactggtaccacgccaaatgcgtcaaaaaggcgaaccattctcaccaggtgctaaccctgcatacggtgctgaaaagaggtgcattagcttcacttctttcaactgccaaattaccataccgttacgcaactgacgatttccaacacgttcggcgttacccctaacacgttaggccatgacctcgaatcacggagacacgttagtaaacatgttagacggttacatgaagaacgatgggatgcacttgaacaaacgtcttcaataaagacactttgattgatgctcagaaacaccctgaagaatacccaattaacggttcgggtttctggctattgtgtctacttcgcagatttaaccaaggaacaacgatgacgttatttcacggacattcttcgaatcaatgtaa

SEQ ID NO: 64 - protein, 752 aa, Lactobacillus plantarum
MITSEKTTKPAAWKGFKGGHWQEEINIRDFIQNNFTQYNGDESFLAGPTAATKTLNDKVLELKKQERAAGGVLDADTKVVATITSHGPGYIQKDLEKIVGLQTDKPLKRAFMPFGGIRMADDALKSYGYTPDEENDKIFTEYRKTHNQGVFDVYTPDMRKARHYKIITGLPDAYARGRLIPDLPRVAVYGIDRLMEDKANDFAHIGDGELTDDVIRLREEVQDQYRALADMKKMAASYGYDISKPATNAQEAIQWMYFAYLAAIKTQNGAAMSVGRIDTTMDIFIQRDLDNGVLDESQAQELIDQFVMKLRMVRFIRTEEYNSLFSGDPIWATLSMCGLGVDGQHHVTKTAFRILKTLDNMGAAPEPNITILWSDRLPEDFKRYATEVSIDSSTIQYENDDLMRVQWGTDYYGIACCVSAQPIADGIQYFGARANLAKAILYAINGGRDEIAGDQVGPAYEPITSEYIDYDEFMKKLDKQMDWLADTYVNSLNAIHYMHDKYYYEAAQLALKNTDLDRTFATGISGLSHAADSISAIKYGHVKVIRDERGIAVDFKADNDYPRYGNNDDRADDIAKWLVKELYSKMNTHHLYRNAKLSTSVLTITSNVVYGKNTGTTPNGRQKGEPFSPGANPAYGAEKSGALASLLSTAKLPYRYATDGISNTFGVTPNTLGHDLESRKDTLVNMLDGYMKNDGMHLNINVFNKDTLIDAQKHPEEYPTLTVRVSGYCVYFADLTKEQQDDVISRTFFESM

SEQ ID NO: 65 - DNA, 2185 bp, Lactobacillus plantarum
atgattacatcagaaaagacaacaaaaccagcagcttggaaaggtttcaaaggcgggctggcaggaagaaatcaacattcgtgattttattcaaaataacttcacacagtacaatggacgaaagcttcctggccggaccaacagccgctactaagaccttgaatgacaaagtctgaattaaagaaacaagaacgtgccgctggtggtgtgttggacgctgatactaaagtcggcaacgattacttcacacggccctggttatattcaaaaagatctcgaaaagattgttgctccagactgacaagcctttgaagcgggccttcatgccatttggtggtattcgaatgggatgacgctttgaaatcatacggttatacccctgatgaagaaaacgacaagattttcagaatatcgcaagactcataaccaaggcgtcttcgatgtttatactcctgacatgcggagcacgtcactacaagatcatcaccggactaccagatgcatacgcacgtggccgtctcacctgatcttccacgggtcgctgtttatgggatcgatcgtttaatggaagacaaagctagactttgcccacattggtgatggtgaattgactgatgatgttattcgcctccgtgaaggttcaagatcaataccgtgctttagcagatatgaagaagatggctgccagttatggctgatattagcaagcctgcaactaatgctcaagaagctattcaatggatgtacttcgcttttagctgctatcaagacccaaaacggcgctgcaatgtccgttggccggattgatacaaatggacatcttcatccaacgtgacttggacaatggtgttctggacgaaagccaagctcgaattaattgatcaattcgtcatgaaactacggatggttcggttcatccgtactgaagtacaattctctcttctctggtgacccaatctgggcaaccttatcaatgtgtggtttaggtcgacggtcaacaccatgtgactaagaccgctttccggattttaaagactttggacaatgggcgccgcaccagaaccaaacatcacgattttatggtcagatcgcttaccagaagttcaaacgttacgcaactgaagtttcaatcgacagttcaaccattcagtatgaaaatggacttgatgcgggtacaatggggtaccgattattatggcattgcttgctgtgtttccgcaaccaattgctgatggaatccagtacttcggtgcccgggcaaacttagccaaagcgactttatgccatcaatggtggccgcgacgaaattgctggagatcaagttggccctgcttgaaccaattacttcagaatacatcgattacgacgaattcatgaagaaattagacaagcatggattggttagctgacacttacgtgaactcactgaatgcaattcattatatgcatgaagtactactatgaagctgcccaattagctttgaagaatactgatcttgatcggacctgcaactgggatttctggcttatcacatgccgcggattcaatctcagctatcaagtatgcacgttaaagtaattcgtgacgaacgtggtatcgccgttgacttcaaagccgacaatgtacccacgttatgggaacaatgacgatcgcgctgatgacattgctaaatggttagtcagaattatacagcaagatgaacacgcatcacctctatcggaatgccaaactttcaacttgttttgacgattacctccaacgttgtttatggtaagaacactggtaccacaccaaatgcgtcaaaaaggcgaaccattctcaccaggtgctaaccctgcatacggtgctgaaaagaggtgcattagcttcacttctttcaactgccaaattaccataccgttacgcaactgacgatttccaacacgttcggcgttacccctaacacgttaggccatgacctcgaatcacggagacacgttagtaaacatgttagacggttacatgaagaacgatgggatgcacttgaacaaacgtcttcaataaagacactttgattgatgctcagaaacaccctgaagaatacccaattaacggttcgggtttctggctactgtgtctacttcgcagatttaaccaaggaacaacgatgacgttatttcacggacattcttcgaatcaatgtaa

SEQ ID NO: 66 - protein, 752 aa, Lactobacillus plantarum; identical to SEQ ID NO: 64

SEQ ID NO: 67 - protein, 2365 aa, Lactobacillus plantarum
ATGATCATGTCTGAAACTTTAACTAAAACAACGACAACTATTAACCACTTCGGTAAATACGCCAATGATGGATCGCTTACGCGATAGCATCATTGATGCAAAACCTTATGTCGATCGAACGGGCGATTCTCACAACCGAAACTTATCGACAACACCAAGACGAACAAGTCGATATTACGGGCTAAAATGCTTGAACACGTTCTTGATAAAATGAGTATCTTCATTGAAGATGACTTTAATTGTTGGTAACCAAGCACGCCAAAATCGTTGGGCACCAGTATTCCCTGAGTTCTATGAATTGGGTCATTGATGAATTAGATACATTTGAGAAGCGTCCTGGTGACGTTTTATATTACGGAGAAATCTAAGGAAGAACTTCGTGCGATTGCGCCTTTCTGGAAACATAACCTTGGAAGACCGCGGCTACGCTAGTTTTCCAGAAGCAAGTCGTATTTTTTATGATTGGTATTATTGGAGCCGATGGTAATATCACTTCTGGTGATGGTCACATTGCGGTCGACTAAAAACGTTGTTAATAAGGGACTTAAATGGTATGAAGACCGCATTAAGACAGCACTTGAATCTTGACCTTACTGATTTTAACCAGCAAAAACAATACTATTTCTATAAAGCGGGCCATTGTAATCGATGCCATTCACAATTTTGCTAAACGTTACGCCCAATTAGCGTCCAAGCGCTCAAAACACGACATCCGCAACTCGCAAAGCACAACTTGAAAAAATCGCCCAAATTCAACAAGGTTCCTTACGAACCTGCAAATTCATTTTATGAAGCGATTCAAGCTGTCTGGTGTTCATCTGACCTTACAAATCGAATCCAACGGTCATTCTGTCTCATATGGTCGTCTAGCAGTACCTAGATCCATTCTATGAGCACGATTTAAAAACTGGTGCTATTGACGCCAACGGCAACCGAATTACTCACAAACTTATGTCTTAAGACGTTAACGATTAATAAAGTACGCTTGGCAACATACTGAATTTTCTGCAGGGAGTCCCCTCTACCAAAACATTACGATTGGTGCAAACACCAGATGGTAAAGATGCCGTTAATCCGACGTCCTATCTGATTTTACGAGCAAGCGCAAGCACATTTACCACAACCCAACTTAACGGTCCGTTATCACCATGGCTTAAGCGAAGTTTATGCGTGAATGTGTCGAAGTTATTAAACAAGGCTTAGGTATGCCTGCGTTTAAACGACGAAATTATTATTCCGTCGTTTATTCGTCGTGGCGTCAAGAAAGAAGACGCCTAATTACAGTGCCATCGGTTGTGTCGAAACAGCGATCCCTGGAAAATGGGGCTATCGTTACCGGGATGAGCTTCATTAACTTCCCACGCGTTCTCTTACTCATTATGAATGGTGGCAGATCCTGAATCTGGCAAACGGTTATTACCCGATTATGGTAAGTTCACTGATATGACTTTTTGATCAACTTATGACTGCTTGGGACAAAGCGCTCCGTGAAATGACACGACAAAGTGATTATCGAAAATAGTTGTGATTTGGCTTTGGAACAAAATTATCCTGATATTCTCTGCTGTTTTAACCGACGATTGTATCGGTCGTGGTAAGACCATTAAAGAAGGTGGCGCGGTATGACTTTATCAGTGGATTACAAGTTGGTATTGCTAACCTAGCGGACTCCCTAGCTGCAAAAGAAACTTGTCTTTGAAGAAAAGAAGTTGACAACAACCCAACTTTGGCACGCACTTAACTGATTTTGCGGATGAAGACGGTGAAAAGATTCGGCAGATGCTCATTAATGATGCCCAAGTATGGTAACGATGATGATTATGTTGATGATTTGATTGTTGAAGCTTATAAACCATATTGATGAAATTGCCAAGTACAAAAACACGCGCTACGGTCGCGGCCCTATTGGTGGCTCGTTACGCAGGAACCTCTTCTATTTCGGCCAACGTTGGTCAAGGGCACAGCACTTTGGACACCAGATGGTCGGCACGCTCGGACACCATTAGCCGAAGGTTGCTCACCAGAACATGATGGATACTAATGGCCCAACTGCTGTGTTCAAATCAGTTTCCAAGTTATCCACTAAGGATCACTGGTGGCGTATTACTGAACCAAAAGATGTCACCACAAATTCTACGGAGTGATGAGCTGCATGAAATTGGTTGCACTACTACGAACCTTCTTCAACCGACTTCATGGTTACCGTCCAATACAACATTGTTTCACGGGATACCTTGATTGATGCACAGAACCATCCTGACACACCGTGACTTGATTGTTCGGGTTGCTGGATATTCCGCCTTCTTCGTGGGCCTATCCAGAAACCCAAGATGATATTATCGAACGGACGGAGCAGTCTCTATAA

SEQ ID NO: 68 - protein, 814 aa, Lactobacillus plantarum
MIMSETLTKTTTTINHFGKLTPMMDRLRDSIIDAKPYVDPERAILTTETYRQHQDEQVDILRAKMLEHVLDKMSIFIEDDTLIVGNQARQNRWAPVFPEYSMNWVIDELDTFEKRPGDVFYITEKSKEELRAIAPFWKHNTLEDRGYASFPEASRIFYDLGIIGADGNITSGDGHIAVDYKNVVNKGLKWYEDRIKTALANLDLTDFNQQKQYYFYKAGLIVIDAIHNFAKRYAQLASKQAQNTTSATRKAQLEKIAQILNKVPYEPANSFYEAIQAVWLVHLTLQIESNGHSVSYGRLDQYLDPFYEHDLKTGAIDANGATELLTNLCLKTLTINKVRSWQHTEFSAGSPLYQNITIGGQTPDGKDAVNPTSYLILRAIAQAHLPQPNLTVRYHHGLSDKFMRECVEVIKQGLGMPAFNNDEIIIPSFIRRGVKKEDAYNYSAIGCVETAIPGKWGYRCTGMSFINFPRVLLLIMNGGIDPESGKRLLPDYGKFTDMTSFDQLMTAWDKALREMTRQSVIIENSCDLALEQNYPDILCSVLTDDCIGRGKTIKEGGAVYDFISGLQVGIANLADSLAAIKKLVFEEKKLTTTQLWHALTTDFADEDGEKIRQMLINDAPKYGNDDDYVDDLIVEAYKPYIDEIAKYKNTRYGRGPIGGLRYAGTSSISANVGQGHSTLATPDGRHARTPLAEGCSPEHAMDTNGPTAVFKSVSKLSTKDITGGVLLNQKMSPQILRSDESCMKLVALLRTFFNRLHGYHVQYNIVSRDTLIDAQNHPDKHRDLIVRVAGYSAFFVGLSKETQDDIIERTEQSL

SEQ ID NO: 69 - DNA, 2188 bp, Lactobacillus casei
atgaaacagcttgacgaaaccaaagttcctaattattgggaaggctttaacggcggcgtggcaagaagaaattaatgtgcgcgattttatcgagcataacctgaaccaatatgacggacgaaagtttccttgctggccccactgaagcgacaacagtcctgaacaatcaggttcaatttaaagaagcaagaacgtgcaaatggcggtgttttggatgctgacaacaatattctctacgatcacctcacacggccctggttatttgaacaaagatcttgaaaagattgttggttcagaccgacaagccattcaaacgagcattcatgccatttggcggtattcgaatgggaagatgcattggaatcttatggcttcaagacagatcctcaagaacacaagattttcagaatatcgtaagacccataaccaaggtgtctttgatgcttatacccctgatatgcgaagctcgccattacaagatcgtgactggcttgccagacgcatacggccgtggccggattgtctgatttcccacggatcgctgtttacgggatcgatcgtttaatggctgagaagttcagattataacttgaccggcgacggcgaaatgactgacgatgtaatcaaactgcgtgaagatcaatgaacaatatcgtgccttaaacgacatgaagaagatggccaaggaatatggctgacatctcgcgtccggcagctaatgcgcaagaagctgttcagtggatctactttggctctggctgctgttaagactcaaaacggtgccgcaatgtccgttggccggatcgatacggattgatgcttatatccaacgcgatatgcgcttaggcaaattgaacgaagaacaggcacgaactgattgatcatttggttatgaaattgcggatggttcgtttcatccggactgaagtataactcactgttctcaggcgatccaatctgggcaaccttgtcattggcaggaatggaatgatggccgtcaccacgttaccaagacggctttccgtttcctgaagactttggacaatgggcgcagcaccagaaccaaacatcaccttgctttggagcgaacgcttgccagaagttcaaacgctatgcaaccgaagtatccatccaaagttcaaccattcaatatgaaaatggacctgatgcgcaacgaatggggtaccgattactacggtattgcttgctgtgtctcggcaaccaattgctgatggcgttcaatactttggtgcccgtgctaacttagctaagacggctgtatgcgatcaacggtgggaaagatgaaattcaggaagcgcaagtagggcctgaatgcaccgatcaccagcgattacattgattacaaagaattcatgaataagttcgacaagaatggactggctggccgacacgtatgtcaatgctttgaatgtgattcactatatgcatgaagtattattatgaagctgcacagctggcattgaaggatacccaactgaaccggacctgcaaccgggatttccggcctgtcacacgcggttgattccatcagtgcaatcaagtatgcatgtcaaggcaattcgcgatgaaaacggtgttgcagttgacttcgttgctgacaatggactatccacgctatggtaacaacgatgatcgcgctgatgacatcgctaagtggttggaagaccttctataacaagatgaacacgcatcatctgtatcgcggcgcgaagttgagtaagtgtcctgaccattacctccaacgtggtttatggtaagaatacagggacaacaccaaggtcgtcaaaaaggcgaaccattctcaccaggtgccaacccggcatacggcgcagaaaaacggcgcattggcatccttgatgtccaccgccaagattccgtatcattacgcaactgggcattagtaatacgtttggggttactccgaacacactgggccacgatgatgaaactcaaggataccttggttcacatggttgacggctatatggaaaacagcggcatgcatttgaatcaacgtcttcaacaaggagaccctgattgatgctcagaagcacccagaagaataccacattgaccgttcgggtttctggctactgcgtctacttcgcagatttgaccaaggaaccaagacgatgtcattgctcggaccttcttcgaagaaatgtaa

SEQ ID NO: 70 - protein, 753 aa, Lactobacillus casei
MKQLDETKVPNYWEGFNGGDWQEEINVRDFIEHNLNQYDGDESFLAGPTEATTVLNNQVLNLKKQERANGGVLDADNNIPSTITSHGPGYLNKDLEKIVGVQTDKPFKRAFMPFGGIRMAEDALESYGFKTDPQEHKIFNEYRKTHNQGVFDAYTPDMRKARHYKIVTGLPDAYGRGRIVSDFPRIAVYGIDRLMAEKFKDYNLTGDGEMTDDVIKLREEINEQYRALNDMKKMAKEYGYDISRPAANAQEAVQWIYFGYLAAVKTQNGAAMSVGRIDTVIDAYIQRDMRLGKLNEEQAQELIDHLVMKLRMVRFIRTEEYNSLFSGDPIWATLSLAGMGNDGRHHVTKTAFRFLKTLDNMGAAPEPNITLLWSERLPEGFKRYATEVSIQSSTIQYENDDLMRNEWGTDYYGIACCVSAQPIADGVQYFGARANLAKTVLYAINGGKDEIQEAQVGPEYAPITSDYIDYKEFMNKFDKMMDWLADTYVNALNVIHYMHDKYYYEAAQLALKDTQLNRTFATGISGLSHAVDSISAIKYGHVKAIRDENGVAVDFVADNDDYPRYGNNDDRADDIAKWLVKTFYNKMNTHHLYRGAKLSTSVLTITSNVVYGKNTGTTPNGRQKGEPFSPGANPAYGAEKNGALASLMSTAKIPYHYATDGISNTFGVTPNTLGHDDETRKDTLVHMVDGYMENSGMHLNINVFNKETLIDAQKHPEEYPTLTVRVSGYCVYFADLTKEQQDDVIARTFFEEM

SEQ ID NO: 71 - DNA, 2188 bp, Lactobacillus casei
atgaaacagcttgacgaaaccaaagttcctaattattgggaaggctttaacggcggcgtggcaagaagaaattaatgtgcgcgattttatcgagcataacctgaaccaatatgacggacgaaagtttccttgctggtcccactgaagcgacaacagtcctgaacaatcaggttcaatttaaagaagcaagaacgtgcaaatggcggtgttttggatgctgacaacaatattctctacgatcacctcacacggccctggttatttgaacaaagatcttgaaaagattgttggttcagaccgacaagccattcaaacgagcattcatgccatttggcggtattcgaatgggaagatgcattggaatcttatggcttcaagacagatcctcaagaacacaagattttcagaatatcgtaagacccataaccaaggtgtctttgatgcttatacccctgatatgcgaagctcgccattacaagatcgtgactggcttgccagacgcatacggccgcggccggattgtctgatttcccacggatcgctgtttacgggatcgatcgtttaatggctgagaagttcagattataacttgaccggcgacggcgaaatgactgacgatgtaatcaaattgcgtgaagatcaatgaacaatatcgtgccttaaacgacatgaagaagatggccaaggaatatggctgacatctcgcgtccggcagctaatgcgcaagaagctgttcagtggatctactttggctctggctgctgttaagactcaaaacggtgccgcaatgtccgttggccggatcgatacggattgatgcttatatccaacgcgatatgcgcttaggcaaattgaacgaagaacaggcacgaactgattgatcatttggttatgaaattgcggatggttcgtttcatccggactgaagtataactcactgttctcaggcgatccaatctgggcaaccttgtcattggcaggaatggaatgatggccgtcaccacgttaccaagacggctttccgtttcctgaagactttggacaatgggcgcagcaccagaaccaaacatcaccttgctttggagcgaacgcttgccagaagtttaaacgctatgcaaccgaagtatccatccaaagttcaaccattcaatatgaaaatggacctgatgcgcaatgaatggggtaccgattactacggtattgcttgctgtgtctcggcaaccaattgctgatggcgttcaatactttggtgcccgtgctaacttagctaagacggctgtatgcgatcaacggtggtaaagatgaaattcaggaagcgcaagtagggcctgaatgcaccgatcaccagcgattacattgattacaaagaattcatgaataagttcgacaagaatggactggctggccgacacgtatgtcaatgctttgaatgtgattcactatatgcatgaagtattattatgaagctgcacagctggcattgaaggatacccaactgaaccggacctgcaaccgggatttccggcctgtcacacgcggttgattccatcagtgcaatcaagtatgcatgtcaaggcaattcgcgatgaaaatggtgttgcagttgacttcgttgctgacaatggactatccacgttatggtaacaacgatgatcgcgctgatgacatcgctaagtggttggaagaccttctataacaagatgaacacgcatcatctgtatcgcggcgcgaagttgagtaagtgtcctgaccattacttccaacgtggtttatggtaagaatacagggacaacaccaaggtcgtcaaaaaggcgaaccattctcaccaggtgccaacccggcatacggcgcagaaaaacggcgcattggcatccttgatgtccaccgccaagattccgtatcattacgcaactgggcattagtaatacgtttggggttactccgaacacactgggccacgatgatgaaactcaaggataccttggttcacatggttgacggctatatggaaaacagcggcatgcatttgaatcaacgtcttcaacaaggagaccctgattgatgctcagaagcacccagaagaataccacattgaccgttcgggtttctggctactgcgtctacttcgcagatttgaccaaggaaccaagacgatgtcattgctcggaccttcttcgaagaaatgtaa

SEQ ID NO: 72 - protein, 753 aa, Lactobacillus casei; identical to SEQ ID NO: 70

SEQ ID NO: 73 - DNA, 2298 bp, Bifidobacterium adolescentis
atggcagcagttgatgcaacggcggtctcccaggaggaacttgaggctaaggcttgggggcttcaccgagggcaactggcagaaggacattgatgtccgcgacttcatccagaagatacacgccatatgagggcgacgagtccttcctggctgacgccaccgacaagaccaagcctgtggaagtatctggacgacaactatctgtccgtggagcgcaagcagcgcgtctacggtggacacccacaccccggcgggcatcgacgccttcccggccggctacatcgattcccgaagtcgacaatgtgattgtcggtctgcagaccgatgtgccgtgcaagcgcgccatgaccgaacggcggctggcgtatggtcgagcaggccatcaaggaagccggcaaggagcccgccggagatcaagaagatcttcaccaagtaccgcaagacccacaacgacggcgtcttcggtctacaccaagcagatcaaggtagctcgccacaacaagatcctcaccggcctgccgggcctacggccgtggccgcatcatcggcgattaccgtcgtgtggccctgtacggcgtgagcgctgatcaagttcaagcagcgcgacaaggactccatcccgtaccgcaacgacttcagagccggagatcgagcactggatccgcttccgtgaggagcatgacgagcagatcaaggctgaagcagctgatcaacctcggcaacgagtacggcctcgacctgtcccgcccggcacaccgcacaggaagccgtgcagtggacctacatgggctacctcgcctccgtcaagagccgacggcgccgccatgtccttcggccgtgtctccaccttcttcgacgtctacttcgagcgacctgaaggccggcaagatcaccgagaccgacgcacaggagatcatcgataacctggatgaagctgcgcatcgtgcgcttcctgcgcaccaaggattacgacgcgatcttctccggatccgtactgggcgacttggtccgacgccggcttcggcgacgacggccgtaccatggaccaagacctcgttccgtctgctcaacaccctgaccctcgagcacctcggacctggccgagccgaacatcaccatcttctgggatccgaagctgccggaagcctacaagcgcttctgcccgaatctccatcgacacctcggccatccagtacgagtccgataaggaaatccgctcactggggcgacgacgccgccatcgcatgctgcgtctccccgatgcgcgtgggcaagcatgcagttcttcgccgcccgtgtgaactccgccaaggccctgctgtacgccatcaacgggacgcgacgagatgaccggcatgcaggtcatcgacaagggcgtcatcgacccgatcaccggaagccgatggcacgctggattacgagaaggtcaaggccaactacgagaaggcccgaatggctgtccgagacctatgtgatggctctgaacatcatccattacatgcatgatatacgcttacgagtccatcgagatggctctgcacgacaaggaagtgtaccgcaccctcgtgcggcatgtccggcctgtcgatcgcggccgactccctgtccgcatgcaagtacgccagtctacccgatctacaacaaggacgccaagaccacgccgggccacgagaacgagtacggaaggcgccgatgacgatctgatcgtcggctaccgcaccgaaggcgacttcccgctgtggcaacgatgatgaccgtgccgacgacatcgccaagtgggtcgtctccaccgtcatggcaggtcaagcgtctgccggtgtaccgcgacgccgtcccgacccagtccatcctgaccaacctccaatgtggaatacggcaaggccaccggcgccttcccgtccggccacaagaaggaccccgtacgctccgggcgccaacccggagaacggcatggactcccacggcatgctgctccatgttctccgtcggcaagatcgactacaacgacgctcttgacggcatctcgctgaaacaccatcacccctgatggtctgggccgcgacgaggaagagcgtatcggcaacctcgggcatcctggacgccggcaacggccacggcctgtaccacgccaacatcaacgtgctgcaaggagcagctcgaggatgccgtcgagcatccggagaagtacccgcacctgaccgtgcgtctccggctacgcggtgaacttcgtcaagctcaccaaggaacagcagctcgacgtgatcccgtacgttccaccagggcgctgtcgtcgactga

SEQ ID NO: 74 - protein, 791 aa, Bifidobacterium adolescentis
MAAVDATAVSQEELEAKAWEGFTEGNWQKDIDVRDFIQKNYTPYEGDESFLADATDKTKHLWKYLDDNYLSVERKQRVYDVDTHTPAGIDAFPAGYIDSPEVDNVIVGLQTDVPCKRAMMPNGGWRMVEQAIKEAGKEPDPEIKKIFTKYRKTHNDGVFGVYTKQIKVARHNKILTGLPDAYGRGRIIGDYRRVALYGVNALIKFKQRDKDSIPYRNDFTEPEIEHWIRFREEHDEQIKALKQLINLGNEYGLDLSRPAQTAQEAVQWTYMGYLASVKSQDGAAMSFGRVSTFFDVYFERDLKAGKITETDAQEIIDNLVMKLRIVRFLRTKDYDAIFSGDPYWATWSDAGFGDDGRTMVTKTSFRLLNTLTLEHLGPGPEPNITIFWDPKLPEAYKRFCARISIDTSAIQYESDKEIRSHWGDDAAIACCVSPMRVGKQMQFFAARVNSAKALLYAINGGRDEMTGMQVIDKGVIDPIKPEADGTLDYEKVKANYEKALEWLSETYVMALNIIHYMHDKYAYESIEMALHDKEVYRTLGCGMSGLSIAADSLSACKYAKVYPIYNKDAKTTPGHENEYVEGADDDLIVGYRTEGDFPLYGNDDDRADDIAKWVVSTVMGQVKRLPVYRDAVPTQSILTITSNVEYGKATGAFPSGHKKGTPYAPGANPENGMDSHGMLPSMFSVGKIDYNDALDGISLTNTITPDGLGRDEEERIGNLVGILDAGNGHGLYHANINVLRKEQLEDAVEHPEKYPHLTVRVSGYAVNFVKLTKEQQLDVISRTFHQGAVVD

SEQ ID NO: 75 - DNA, 2335 bp, Bifidobacterium longum
gtgaagatgcgaaacctacaaccccatttaaggagtgacatgaccgcagtggaaaatggctgtctcccaggaggagctcgacgccaaggcgtgggccggcttcaccgagggcaactcagaaggatattgacgtccgcgacttcatccagaagaactacaccccgtacgagggcggagacattcctggctcctgccaccgagaagaccaagcacctgtggaagtacctcgacgaactacctggccgtggagcgcaagcagcgcgtctacgacgtggacacccataccccgggacgtcgacgccttcccggccggctacatcgactccccggaagtcgataacgtggtcgggcctccagaccgacgttccctgcaagcgcgcgatgatgccgaacggtggctggcgcagtcgagcaggccatcaaggaagccggcaaggaaccggatccggagatcaagaagatctaccaagtaccgcaagacccacaacgacggcgtcttcggcgtgtacaccaagcagatcagtcgcccgccacaacaagatcctcaccggtctgccggacgcctacggccgtggccgcaatcggcgactaccgccgcgtcgccctgtacggcgtgaacaagctcatcgccttcaagacgcgacaaggactccgtgccgtaccgcaacgacttcaccgagccggagatcgagcactatccgcttccgtgaggagcacgacgagcagatcaaggccctgaagaagctcatcaaccggcaacgagtacggcctcgacctgtcccgcccggcccagaccgcgcaggaagccgtgctggacctacatgggctacctggcctccatcaagtcccaggacggcgccgccatgtcctggccgcaactccgccttcctcgactgctacatcgagcgcgacctccaggccggcaagaaccgagaccgacgcccaggagctcatcgacaacatcgtcatgaagctgcgcatcgtgcttcctgcgtaccaaggactacgattcgatcttctccggcgacccgtactgggcgaccttccgacgccggcttcggcgatgacggccgttcgatggtcaccaagacctcgttccgtcctcaacaccctgaccctcgagcacctcggacctggccccgagccgaacatcaccatcttgggatccgaagctgcctgaggcctacaagcgcttctgcgccaagatctccatcgacatcggccatccagtacgagtccgacaaggagattcgtagccactggggcgacgacgcggatcgcatgctgcgtgtccccgatgcgtgtcggcaagcagatgcagttcttcgccgcccgtgaactccgccaaggccctgctgtacgccatcaacggcggccgcgacgagatgaccgatgcaggtcatcgacaagggcgtgatcgagccgattaccccggaggccgacggcacccgactacgagaaggtcaagaacaactacgagaaggctctcgagtggctgtccgagacctgtcatggccctgaacatcatccactacatgcacgataagtacgcgtacgagtccatcgatggccctgcacgacaaggaagtgtaccgcaccctcggctgcggcatgtccggtctgtatcgccgccgactccctcgccgccgtcaagtacgccaaggtctacccgatctacaacagacgcgaagaccctggaaggccacgagtacgagtacgttgagggcgccgacgacgaccatcgtcggctaccgcaccgagggcgagttcccggtctacggcaacgacgacgaccgcggacgacatcgccaagtgggtcgtctccacggtcatgggccaggtcaagaggctcccggtaccgcggcgccgtcccgacccagtccatcctgacgatcacctccaacgtcgagtacgaagaacaccggttccttcccgtccggccacgccaagggcaccccgtacgctccgggcgaacccggagaacggcatggactcccacggcatgctgccgtccatgttctccgtcggcaatcgactacaacgacgctcttgacggcatctcgctgaccaacaccatcacccctgatgctgggccgcgacgaggacgagcgcatcggcaacctggtcggcatcctggacgccggcaggccacggcctctaccacgcgaacatcaacgttctgcgcaaggagaccatggaggacggtcgagcaccccgaaaagtacccgcacctgaccgtgcgtgtctccggctacgcggtgattcgtcaagctcaccaaggagcagcagctcgacgtcatctcccgtaccttccaccagggccgtcgtcgactga

SEQ ID NO: 76 - protein, 804 aa, Bifidobacterium longum
MKMRNLQPHLRSDMTAVENAAVSQEELDAKAWAGFTEGNWQKDIDVRDFIQKNYTPYEGDETFLAPATEKTKHLWKYLDDNYLAVERKQRVYDVDTHTPADVDAFPAGYIDSPEVDNVVVGLQTDVPCKRAMMPNGGWRMVEQAIKEAGKEPDPEIKKIFTKYRKTHNDGVFGVYTKQIKVARHNKILTGLPDAYGRGRIIGDYRRVALYGVNKLIAFKKRDKDSVPYRNDFTEPEIEHWIRFREEHDEQIKALKKLINLGNEYGLDLSRPAQTAQEAVQWTYMGYLASIKSQDGAAMSFGRNSAFLDCYIERDLQAGKITETDAQELIDNIVMKLRIVRFLRTKDYDSIFSGDPYWATWSDAGFGDDGRSMVTKTSFRLLNTLTLEHLGPGPEPNITIFWDPKLPEAYKRFCAKISIDTSAIQYESDKEIRSHWGDDAAIACCVSPMRVGKQMQFFAARVNSAKALLYAINGGRDEMTGMQVIDKGVIEPITPEADGTLDYEKVKNNYEKALEWLSETYVMALNIIHYMHDKYAYESIEMALHDKEVYRTLGCGMSGLSIAADSLAAVKYAKVYPIYNKDAKTLEGHEYEYVEGADDDLIVGYRTEGEFPVYGNDDDRADDIAKWVVSTVMGQVKRLPVYRGAVPTQSILTITSNVEYGKNTGSFPSGHAKGTPYAPGANPENGMDSHGMLPSMFSVGKIDYNDALDGISLTNTITPDGLGRDEDERIGNLVGILDAGNGHGLYHANINVLRKETMEDAVEHPEKYPHLTVRVSGYAVNFVKLTKEQQLDVISRTFHQGAVVD

SEQ ID NO: 77 - DNA, 2298 bp, Bifidobacterium longum
atgaccgcagtggaaaatgcagctgtctcccaggaggagctcgacgccaaggcgtgggggcttcaccgagggcaactggcagaaggatattgacgtccgcgacttcatccagaagatacaccccgtacgagggcgacgagacattcctggctcctgccaccgagaagaccaagcctgtggaagtacctcgacgacaactacctggccgtggagcgcaagcagcgcgtctacggtggacacccataccccggccgacgtcgacgccttcccggccggctacatcgactcccgaagtcgataacgtggtcgttggcctccagaccgacgttccctgcaagcgcgcgatgaccgaacggtggctggcgcatggtcgagcaggccatcaaggaagccggcaaggaaccggccggagatcaagaagatcttcaccaagtaccgcaagacccacaacgacggcgtcttcggtgtacaccaagcagatcaaggtcgcccgccacaacaagatcctcaccggtctgccgggcctacggccgtggccgcatcatcggcgactaccgccgcgtcgccctgtacggcgtgaaagctcatcgccttcaagaagcgcgacaaggactccgtgccgtaccgcaacgacttcagagccggagatcgagcactggatccgcttccgtgaggagcacgacgagcagatcaaggctgaagaagctcatcaacctcggcaacgagtacggcctcgacctgtcccgcccggcccaccgcgcaggaagccgtgcagtggacctacatgggctacctggcctccatcaagtcccgacggcgccgccatgtccttcggccgcaactccgccttcctcgactgctacatcgagcgacctccaggccggcaagatcaccgagaccgacgcccaggagctcatcgacaacatcgatgaagctgcgcatcgtgcgcttcctgcgtaccaaggactacgattcgatcttctccggacccgtactgggcgacctggtccgacgccggcttcggcgatgacggccgttcgatggaccaagacctcgttccgtctgctcaacaccctgaccctcgagcacctcggacctggccgagccgaacatcaccatcttctgggatccgaagctgcctgaggcctacaagcgcttctgccaagatctccatcgacacctcggccatccagtacgagtccgacaaggagattcgcacactggggcgacgacgctgctatcgcctgctgcgtgtccccgatgcgtgtcggcaagcatgcagttcttcgccgcccgcgtgaactccgccaaggccctgctgtacgccatcaacgggccgcgacgagatgaccggcatgcaggtcatcgacaagggcgtgatcgagccgattaccggaggccgacggcaccctggactacgagaaggtcaagaacaactacgagaaggctcgagtggctgtccgagacctacgtcatggccctgaacatcatccactacatgcacgatatacgcgtacgagtccatcgagatggccctgcacgacaaggaagtgtaccgcaccctcgtgcggcatgtccggtctgtccatcgccgccgactccctcgccgccgtcaagtacgccagtctacccgatctacaacaaggacgcgaagaccctggaaggccacgagtacgagtacggagggcgccgacgacgacctgatcgtcggctaccgcaccgagggcgagttcccggtctggcaacgacgacgaccgcgccgacgacatcgccaagtgggtcgtctccacggtcatggcaggtcaagaggctcccggtctaccgcggcgccgtcccgacccagtccatcctgacgaacctccaacgtcgagtacggcaagaacaccggttccttcccgtccggccacgccaaggaccccgtacgctccgggcgccaacccggagaacggcatggactcccacggcatgctgctccatgttctccgtcggcaagatcgactacaacgacgctcttgacggcatctcgctgaaacaccatcacccctgatggcctgggccgcgacgaggacgagcgcatcggcaacctggggcatcctggacgccggcaacggccacggcctctaccacgcgaacatcaacgttctgcaaggagaccatggaggacgccgtcgagcaccccgaaaagtacccgcacctgaccgtgcgtctccggctacgcggtgaacttcgtcaagctcaccaaggagcagcagctcgacgtcatcccgtaccttccaccagggtgccgtcgtcgactga

SEQ ID NO: 78 - protein, 791 aa, Bifidobacterium longum
MTAVENAAVSQEELDAKAWAGFTEGNWQKDIDVRDFIQKNYTPYEGDETFLAPATEKTKHLWKYLDDNYLAVERKQRVYDVDTHTPADVDAFPAGYIDSPEVDNVVVGLQTDVPCKRAMMPNGGWRMVEQAIKEAGKEPDPEIKKIFTKYRKTHNDGVFGVYTKQIKVARHNKILTGLPDAYGRGRIIGDYRRVALYGVNKLIAFKKRDKDSVPYRNDFTEPEIEHWIRFREEHDEQIKALKKLINLGNEYGLDLSRPAQTAQEAVQWTYMGYLASIKSQDGAAMSFGRNSAFLDCYIERDLQAGKITETDAQELIDNIVMKLRIVRFLRTKDYDSIFSGDPYWATWSDAGFGDDGRSMVTKTSFRLLNTLTLEHLGPGPEPNITIFWDPKLPEAYKRFCAKISIDTSAIQYESDKEIRSHWGDDAAIACCVSPMRVGKQMQFFAARVNSAKALLYAINGGRDEMTGMQVIDKGVIEPITPEADGTLDYEKVKNNYEKALEWLSETYVMALNIIHYMHDKYAYESIEMALHDKEVYRTLGCGMSGLSIAADSLAAVKYAKVYPIYNKDAKTLEGHEYEYVEGADDDLIVGYRTEGEFPVYGNDDDRADDIAKWVVSTVMGQVKRLPVYRGAVPTQSILTITSNVEYGKNTGSFPSGHAKGTPYAPGANPENGMDSHGMLPSMFSVGKIDYNDALDGISLTNTITPDGLGRDEDERIGNLVGILDAGNGHGLYHANINVLRKETMEDAVEHPEKYPHLTVRVSGYAVNFVKLTKEQQLDVISRTFHQGAVVD

SEQ ID NO: 79 - DNA, 2301 bp, Bifidobacterium animalis
atgtcagcaattgaaaacgtggccgaggtgtccccggaagccatcaaggaacaggcttgaggggttcgttcccggcaactgggagaaggacatcgacgttcgtgacttcattcagaaactacacgccttacgagggtgatgaatcgttcctcgcggatgcgaccgacaagacgatacctgtggaagtacctcgacgacaactatctggcggtggagcgcaagcagcgtgtctgatgtggacacccacacgccggcggatatcgacgccttcccggctggctatatcgattccggagatcgacaatgtgatcgtcggcctgcagaccgatgagccatgcaagcgagccaatgccgaatggcggttggcgcatggtggagcaggccatcaaggaggccggcaaggagcgacccggcgatcaagaagatcttcaccaagtaccgcaagacgcataacgacggtgtgtggcgtctatacgaagaacatcaaagtggcacgccacaacaagattctcaccggcctgcgatgcctacggccgcggccgcatcatcggcgactaccgtcgtgtggccctgtatggcggatgcgctgattaagttcaagcagcgtgacaaggacgccatcccgtaccgcaacgacttcggagaccgagatcgagcactggatccgttaccgcgaggagcacgacgagcagattagctctgaagaagctcatcaacctaggcaaggaatacggactcgatttggcgcgccccgatgaacgcgcgtgaggccgtgcagtggacctacatgggctacctcgcctccatcaagacaggacggcgccgcgatgagcttcggccgcgtgtcagcgttcttcgacatctacttcgcgcgatctcaaggaaggcaagatcaccgagaccgacgcccaggagatcatcgacaatcgtgatgaagctgcgcatcgtgcgattcctgcgcaccaaggactacgattcgatcttctggcgacccctactgggcgacatggtcggatgcaggcttcggcgacgatggccgcaccagtcaccaagacgtcgttccgtctgctcaacacgctcacgctcgagcatttgggaccggcccgaaccgaacatcacgattttctgggatccgaagctgccggaaggctacaagcgtttgcgcccagatctccattgatacctcggccatccagtatgaatccgacaaggagatccaaccattggggtgacgatgcggccattgcatgctgcgtctccccgatgcgtgtgggcacaaatgcagttcttcgcggctcgcgtgaactccgccaaggcgctgctctacgcgatcaggcggccgtgacgagatgaccggcatgcaggtgatcgacaagggcatcatcgagccgacagcccgaggctgacggcacgctcgattacgagaaggtgaaggccaactatgagaaggctcgaatggctttcggagacctacgtcgaagcgctgaacatcattcattacatgcatgaagtatgcgtatgagtccatcgagatggcgctgcacgaccgcgaggtctaccgcacccggctgcggcatgtccggcctgtcgatcgccgccgattcgctttccgcatgcaagtacgaaggtgtacccaatctacaacaaggacgccaaggacatgccgggtcacgagtacgaatgtcgaaggcgcggacgacgatctggtggtcggctaccgcaccgagggcgagttcccgctacggcaacgacgacgatcgtgccgatgacattgccaagtgggtcgtgtccaccgtcaggccaggtcaagcgcctgccggtgtatcgtggtgccgtccccacgcagtcgatcctcaatcacctcgaacgtcgagtatggcaagaacaccggatccttcccgtcgggccacgccaggaacgccgtacgccccgggcgcgaacccggagaacggcatggactcccatggcatgcccctcgatgttctcggtgggcaagatcgattacaacgacgcccttgacggcatctcgcacgaacacgatcacacccgacggcctgggccgcgatgaggacgaacgcatcagcaaccgtcggcatcctcgacgcaggcaacggccatggactgtaccatgcgaacatcaacgtgccgcaaggaacagctcgaagacgccgtggagcacccggagaagtacccgcacctgaccgcgcgtctccggttacgccgtgaacttcgtcaagcttacgaaggaacagcagcttgacgatttcccgcaccttccatcagggcgcggtcgaggactaa

SEQ ID NO: 80 - protein, 792 aa, Bifidobacterium animalis
MSAIENVAEVSPEAIKEQAWEGFVPGNWEKDIDVRDFIQKNYTPYEGDESFLADATDKTKYLWKYLDDNYLAVERKQRVYDVDTHTPADIDAFPAGYIDSPEIDNVIVGLQTDEPCKRAMMPNGGWRMVEQAIKEAGKEPDPAIKKIFTKYRKTHNDGVFGVYTKNIKVARHNKILTGLPDAYGRGRIIGDYRRVALYGVDALIKFKQRDKDAIPYRNDFSETEIEHWIRYREEHDEQIKALKKLINLGKEYGLDLARPAMNAREAVQWTYMGYLASIKSQDGAAMSFGRVSAFFDIYFERDLKEGKITETDAQEIIDNLVMKLRIVRFLRTKDYDSIFSGDPYWATWSDAGFGDDGRTMVTKTSFRLLNTLTLEHLGPGPEPNITIFWDPKLPEGYKRFCAQISIDTSAIQYESDKEIRNHWGDDAAIACCVSPMRVGKQMQFFAARVNSAKALLYAINGGRDEMTGMQVIDKGIIEPIQPEADGTLDYEKVKANYEKALEWLSETYVEALNIIHYMHDKYAYESIEMALHDREVYRTLGCGMSGLSIAADSLSACKYAKVYPIYNKDAKDMPGHEYEYVEGADDDLVVGYRTEGEFPLYGNDDDRADDIAKWVVSTVMGQVKRLPVYRGAVPTQSILTITSNVEYGKNTGSFPSGHAKGTPYAPGANPENGMDSHGMLPSMFSVGKIDYNDALDGISLTNTITPDGLGRDEDERISNLVGILDAGNGHGLYHANINVLRKEQLEDAVEHPEKYPHLTVRVSGYAVNFVKLTKEQQLDVISRTFHQGAVED

SEQ ID NO: 81 - DNA, 2152 bp, Clostridium cellulolyticum
atggatccatggagatatttcaaaaacggaaattggtccgaggaaatagatgtaagggtttattattaataattatataccatataaaggagatgattcctttttaaaaggccctagaaaagactcaaaaactctggaaaaaagtcagtggtatccttgacgaggaaagagagaggaggagttctcgatgttgataccaaaataatatcaactatcacttcgcatgaacccgtatattgataaggatttggaaaagattgtaggattgcagacggataaacctctaaaaaggtataatgcctttcggtggtatcaggatggtagtaaagggcggagaggcctacggcaaagattgacgaaagtgttgtaaagctatttactgaatataggaagactcacaatgacggtttacgatgtctatactcccgaaatgatgagggcgaaaaaagcaggtattataaccgcttcctgatgcatacggtagaggaagaataatcggtgattacagaagagttgcactgtggggttgacaggcttatcggagataagcaaaaacaacttacaagcctagaaatggattatggacagtgaaaccatacaggaaagggaagaaagaaaaagtcagataaaagctcttgtacttaaagcaaatggctgaaatgtatggctttgatatttcaaggcctgctgaaaccgcaggaagcatttcaatggttgtatttcggtttcctcggagcagtaaaggagcagaatggcggctatgagtcttggaagagtttcaacattccttgatatttatatagaaagggataaaggaggggacacttaccgaagaagaggcacaggagcttgttgaccattttgttatgacttagattagtaagattcctgagaactccagagtatgagaaactgttctcaggtgaccacatggataaccgaaagcattggaggtatgggtcttgacggacgtactctggtaacgaaattccttcagaatgctgcataccctatttaatctgggtcatgcacccgagcccaataacggtgctttggtcggtgcatctgcctgatggctttaagaaatactgctcatatgtttatcaatacaagctctatccaatacgagagcgatgatataatgaggtattattggggaggactacggcatagcatgctgtgtttcagccatgagaataggaaagcagatgcagttctggagcccgctgcaatatggcgaaagctttgttgtatgcaattaacggggggcgtgatgaaatcgggcgttcaggtaggacctataatgcaggctattgagactgaatatcttgattgatgatgtaataaagaggttcgacgcagtactaacatgggttgcaagactttacatcaactctgaatataatacactatatgcatgacaagtacgcttatgaaagactacagatggttgcacgacaaggacatattaagaacaatggcctgcggaatagcaggattatctgtaggcggattctctgagtgcaattaaatatgcaaaggtaaaggtaataagaaatgaagaggcttgccgttgactatgacatagaaggtgattatccgaaatttggaaataacgacgaccgtagacaatatagccgtaatgctggtaaaaagctttatggagaagctggaaaagcagaacctacaggcactctgttcctaccctttcaatactgactattacatcaaatgttgtatggagctaagacaggtaatacacctgacggaagaaaagcgggagaacccttcggaccgggcaaacccaatgcacggaagagacttgaacggtgcacttgcagttcttaaatccatttaagctgccttaccagtttgcacaggacggtatatcatacactttttcaatagtaccaagcacttggaaaagaggaagatacaaggatcaacaaccttgtgtcactgcttgactctttttaaagaaggcggacatcacattaatatcaatgtatttgagagagaaatgctgctgggcaatggatcatcctgaaaagtacccacagctcacaatcagggtatccggctatgcggaactttataaaattgacgagggaacagcagctagatgtaattaacagaacgatacatgaatata

SEQ ID NO: 82 - protein, 742 aa, Clostridium cellulolyticum
MDPWRYFKNGNWSEEIDVRDFIINNYIPYKGDDSFLKGPTEKTQKLWKKVSGILDEERENGGVLDVDTKIISTITSHEPGYIDKDLEKIVGLQTDKPLKRGIMPFGGIRMVVKGGEAYGKKIDESVVKLFTEYRKTHNDGVYDVYTPEMMRAKKAGIITGLPDAYGRGRIIGDYRRVALYGVDRLIGDKQKQLTSLEMDYMDSETIQEREERKSQIKALEYLKQMAEMYGFDISRPAETAQEAFQWLYFGFLGAVKEQNGAAMSLGRVSTFLDIYIERDMKEGTLTEEEAQELVDHFVMKLRLVRFLRTPEYEKLFSGDPTWITESIGGMGLDGRTLVTKNSFRMLHTLFNLGHAPEPNMTVLWSVHLPDGFKKYCSYVSINTSSIQYESDDIMRYYWGDDYGIACCVSAMRIGKQMQFFGARCNMAKALLYAINGGRDEKSGVQVGPIMQAIETEYLDYDDVIKRFDAVLTWVARLYINTLNIIHYMHDKYAYERLQMALHDKDILRTMACGIAGLSVVADSLSAIKYAKVKVIRNEEGLAVDYDIEGDYPKFGNNDDRVDNIAVMLVKSFMEKLEKQRTYRHSVPTLSILTITSNVVYGAKTGNTPDGRKAGEPFGPGANPMHGRDLNGALAVLKSISKLPYQFAQDGISYTFSIVPKALGKEEDTRINNLVSLLDSYFKEGGHHININVFEREMLLDAMDHPEKYPQLTIRVSGYAVNFIKLTREQQLDVINRTIHENI

SEQ ID NO: 83 - DNA, 2207 bp, Escherichia coli
atgtccgagcttaatgaaaagttagccacagcctgggaaggttttaccaaaggtgactcagaatgaagtaaacgtccgtgacttcattcagaaaaactacactccgtacgagggtggagtccttcctggctggcgctactgaagcgaccaccaccctgtgggacaaagtaatggggcgttaaactggaaaaccgcactcacgcgccagttgactttgacaccgctgttgcttaccatcacctctcacgacgctggctacatcaacaagcagcttgagaaaatcgttggtccagactgaagctccgctgaaacgtgctcttatcccgttcggtggtatcaaaatgatcgggttcctgcaaagcgtacaaccgcgaactggatccgatgatcaaaaaaatcttcactgtaccgtaaaactcacaaccagggcgtgttcgacgtttacactccggacatcctgcgttcgtaaatctggtgttctgaccggtctgccagatgcatatggccgtggccgtatcatcggactaccgtcgcgttgcgctgtacggtatcgactacctgatgaaagacaaactggcacttcacttctctgcaggctgatctggaaaacggcgtaaacctggaacagactatccgtccgcgaagaaatcgctgaacagcaccgcgctctgggtcagatgaaagaaatggctgcgatacggctacgacatctctggtccggctaccaacgctcaggaagctatccagtggacttttcggctacctggctgctgttaagtctcagaacggtgctgcaatgtccttcggtcgtatccaccttcctggatgtgtacatcgaacgtgacctgaaagctggcaagatcaccgaacgaagcgcaggaaatggttgaccacctggtcatgaaactgcgtatggttcgcttcctgcactccggaatacgatgaactgttctctggcgacccgatctgggcaaccgaatctatcgggtatgggcctcgacggtcgtaccctggttaccaaaaacagcttccgtttcctgaacactgtacaccatgggtccgtctccggaaccgaacatgaccattctgtggtctgaaaaacccgctgaacttcaagaaattcgccgctaaagtgtccatcgacacctcttctctgcagtgagaacgatgacctgatgcgtccggacttcaacaacgatgactacgctattgcttgctgtaagcccgatgatcgttggtaaacaaatgcagttcttcggtgcgcgtgcaaacctggaaaaccatgctgtacgcaatcaacggcggcgttgacgaaaaactgaaaatgcaggttgccgaagtctgaaccgatcaaaggcgatgtcctgaactatgatgaagtgatggagcgcagatcacttcatggactggctggctaaacagtacatcactgcactgaacatcatccactatgcacgacaagtacagctacgaagcctctctgatggcgctgcacgaccgtgacgttacgcaccatggcgtgtggtatcgctggtctgtccgttgctgctgactccctgtctgcaaaaatatgcgaaagttaaaccgattcgtgacgaagacggtctggctatcgacttcgaaagaaggcgaatacccgcagtttggtaacaatgatccgcgtgtagatgacctggctgttgctggtagaacgtttcatgaagaaaattcagaaactgcacacctaccgtgacgctatccactcagtctgttctgaccatcacttctaacgttgtgtatggtaagaaaacgggtaacaccagacggtcgtcgtgctggcgcgccgttcggaccgggtgctaacccgatgcacggtcgaccagaaaggtgcagtagcctctctgacttccgttgctaaactgccgtttgcttacgaaagatggtatctcctacaccttctctatcgttccgaacgcactgggtaaagacgacggttcgtaagaccaacctggctggtctgatggatggttacttccaccacgaagcatccagaaggtggtcagcacctgaacgttaacgtgatgaaccgtgaaatgctgctcgacgcgagaaaacccggaaaaatatccgcagctgaccatccgtgtatctggctacgcagtacgttaactcgctgactaaagaacagcagcaggacgttattactcgtaccttcactcaatctataa

SEQ ID NO: 84 - protein, 760 aa, Escherichia coli
MSELNEKLATAWEGFTKGDWQNEVNVRDFIQKNYTPYEGDESFLAGATEATTTLWDKVMEGVKLENRTHAPVDFDTAVASTITSHDAGYINKQLEKIVGLQTEAPLKRALIPFGGIKMIEGSCKAYNRELDPMIKKIFTEYRKTHNQGVFDVYTPDILRCRKSGVLTGLPDAYGRGRIIGDYRRVALYGIDYLMKDKLAQFTSLQADLENGVNLEQTIRLREEIAEQHRALGQMKEMAAKYGYDISGPATNAQEAIQWTYFGYLAAVKSQNGAAMSFGRTSTFLDVYIERDLKAGKITEQEAQEMVDHLVMKLRMVRFLRTPEYDELFSGDPIWATESIGGMGLDGRTLVTKNSFRFLNTLYTMGPSPEPNMTILWSEKLPLNFKKFAAKVSIDTSSLQYENDDLMRPDFNNDDYAIACCVSPMIVGKQMQFFGARANLAKTMLYAINGGVDEKLKMQVGPKSEPIKGDVLNYDEVMERMDHFMDWLAKQYITALNIIHYMHDKYSYEASLMALHDRDVIRTMACGIAGLSVAADSLSAIKYAKVKPIRDEDGLAIDFEIEGEYPQFGNNDPRVDDLAVDLVERFMKKIQKLHTYRDAIPTQSVLTITSNVVYGKKTGNTPDGRRAGAPFGPGANPMHGRDQKGAVASLTSVAKLPFAYAKDGISYTFSIVPNALGKDDEVRKTNLAGLMDGYFHHEASIEGGQHLNVNVMNREMLLDAMENPEKYPQLTIRVSGYAVRFNSLTKEQQQDVITRTFTQSM

SEQ ID NO: 85 - DNA, 576 bp, Chlamydomonas reinhardtii
atgttgaaggctgcgttgccacgaattatgaacgctgctagcatgtcttgtgcagctagggctgcagcgctccggtccgctggcgatgaacgctgcgactacatcgcgaacggggcgcttcagggcttccgaaacattcctggggtgccagtgctcgacgagcatttgttgcacgccactatctcggaacggctgcagccgaagctctcgacgaattactcggtggttctgccaatacgagcccacggatccctcgggcatccctgaggttttcggaaacgtgcattcaagaaagcatgagcgcggtggacggccctggcgtacggtggtccgcaactacctcaagccgcggcggcatcaccatcagcggcggcgaggccatgctgcagccacactttgtgtccactgttccaggttccagggcattgagctgctgccgtaccacgtgttgggccgcaacaagtgaggtcatggggctgccgtaccccctggacggcacgaacacgccgccgcacgagcaggcgggccgtgatcaaggtgttcaacgacaacgacgttcccgtcatctgcgccgag

SEQ ID NO: 86 - protein, 198 aa, Chlamydomonas reinhardtii
MLKAALPRIMNAASMSCAATGLQRSGPLAMNAATTSRTGPASGLPKHSWGASARRAFVAPATISERLQPKLSTNYSVVLPQYEPTDPSGIPEVFGNVHSTESMSAVDGPGVRWSATTSSHAAASPSAAARPCCSHTLCPPCSRFQGIELLPYHVLGRNKWEVMGLPYPLDGTNTPPHEQVRAVIKVFNDNDVPVICAE

SEQ ID NO: 87 - DNA, 775 bp, Neocallimastix frontalis
atgccagctatcgttgatccaactactatggattatatggaagtcaagggcaatgtcctcaactgaaagtttggcttgtcttgaaggtccaggaaacagattccttttatttttaaggttgtgctgctcgttgcttatactgtagtaatccagatacttgggatgaaactgttgactccaatgaccgttggccaacttattaagaagattggaaatcttaaaaactactataaattctgttggtggtggtggtgtcactgtttctggtggtgaaccattaactcaatttgttcttatcttgtttcttatatgctgtcaagaagcacttaaatcttcatacctgtgttgaccactggtcaaggttgtactaaggcttggaattcagttttacctcatactgacttatttagtatgtattaaacatgctattccagaaaaatacgaacaaattactcgtactaagattagatagatgtcttaagttccttaaggaattagaaaagagaaacattccatggtggtcgttacgttgttcttccaggttacactgattctaaggaagatattgaagctttaattgttagttaagaacagtccaacttgtgaaagaattgaattccttccataccccgaattagaaaaacaaatgggaagaattaggtattgaatatccattaaagaatattaaacaacttaaaaagtgaaattaaatggatctgtgatatggtccgtgaagctttcaaggaccgtaataccagttactggtgatacttaa

SEQ ID NO: 88 - protein, 266 aa, Neocallimastix frontalis
MPAIVDPTTMDYMEVKGNVHSTESLACLEGPGNRFLLFLNGCAARCLYCSNPDTWDETVGTPMTVGQLIKKIGNLKNYYINSVGGGGVTVSGGEPLTQFGFLSCFLYAVKKHLNLHTCVETTGQGCTKAWNSVLPHTDLCLVCIKHAIPEKYEQITRTKKLDRCLKFLKELEKRNIPWWCRYVVLPGYTDSKEDIEALIELVKNSPTCERIEFLPYPELGKNKWEELGIEYPLKNIKQLKKSEIKWICDMVREAFKDRNIPVTGDT

SEQ ID NO: 89 - DNA, 2414 bp, Chlamydomonas reinhardtii
atgttaacacccttaagctatcctatcatcaacaccgtctcgtcaagtctgccagcgccacgccatgagccagatgctgctggagaagacaatgcgccggggcctcgccacggtctgccgcagcgagctccgctgttggccggcccatccccatggctgttaggtcgccgatgctcgatggccgctgccagcgcggccgctgaggccctcccggtggcacccagccacagctgctgctgaccccgacaagcacccgcacctgcccgacccccgcccgaagccggccgtgggcgggcatcaacgtccagaagtatgtgcaggacaactacaccgcttacgccggcaacttccttcctggctggccccactgacaacaccaagaagctgtggagcgagctggagaagaattgccaccgagatcgagaagggcgtgatggacgtggatccctccaagccctccaccaaccgccttcccgcccggctacatcgacaaggacctggagacggtggtggggctgcagagacgcgccgctcaagcgcgccatcaagcccctgggcggcgtcaacatggtcaaggcggctggagtcgtacggctacacccccgaccccgaggtggcccgcctgtacagcacggtgcaagacgcacaacagcggcgtgtttgacgcctacacggacgagatgcgcgccgcgcgcaagcggcatcctgtccggcctgcccgacggctacggccgcggccgcatcatcggcgactcgccgcgtggcgctgtacggcgtggacgcgctgatcaaggccaagaagaccgacctgacacaacctgctgggcgtgatggacgaggagaagatccgcctgcgcgaggaggtgaacgcagatccgcgcgctcagcgagctcaaggagatgggcgccgcctacggcttcgacctgacgccccgccgccaactcgcgcgaggcggtgcagtggctgtacttcggctacctgggcggtcaaggagcaggacggcgccgccatgagcctgggccgcatcgacgccttcctggacatactttgagcgcgacctcaaggccggcaccatcactgaggccgaggtgcaggagctgagaccacttcgtcatgaagctgcgcatcgtgcgccagctgcgcacgcccgagtacaacgctgtttgccggcgaccccacctgggtcacctgcgtgctgggcggcactgacgccagcgaaggccatggtcaccaagaccagcttccgcctgctcaacaccctgtacaacctgggccgcgcccgagcccaacctgacggtgctgtggaacgacaacctgcccgcgcccttcaaggttctgcgccaaggtgtcgctggacaccagctccatccagtacgagtccgacaacctcaagcaagctgtttggctccgactactccatcgcctgctgcgtgtcggccatgcgcgtggaaggacatgcagtactttggcgcccgcgccaacctgcccaagctgctgctgtacacgcaacggcggccgcgacgaggtgtcgggcgaccaggtggggcccaagttcgcgccggtgcagccccaccgcgccgttggactatgaggaggtcaaggccaagatcgaggacggcatggtggctggcctccatgtacgcgaacaccatgaacatcatccactacatgcacgacaagtgactacgagcggctgcagatggcgctgcacgacacgcacgtgcgccgcctgctggcgtggcatcagcggcctgtccgtggtgaccgactcgctgtcggccatcaagtacgcccaggacgcccgtgattgacgagcgcggcctcatgacggacttcaaggtggagggcagcttccaagtacggcaacgacgatgaccgcgtggacgagatcgccgagtgggtggtgtccaccttccagcaagctggccaagcagcacacctaccgcaactcggtgcccacgctgtcggtgcaccatcacctccaacgtggtgtacggcaagaagacgggctccacccccgacggccgcaaagggcgagcccttcgcgcccggcgccaacccgctgcacggccgcgacgcccacggcgctggcctcgctcaactcggtggccaagctgccctacaccatgtgcctggacggcatctaacaccttctcgctcatcccccaggtgctgggcaggggcggcgagcacgagcgcgccaaacctggcctccatcctggacggctactttgccaacggcggccaccacatcaacgtcagtgctcaaccgctccatgctcatggacgccgtggagcaccccgagaagtaccccaaccaccatccgcgtgtccgggtacgctgtgcacttcgcgcgcctcacgcgcgagcagcagcgaggtgatcgcgcgcaccttccacgacaccatgtaa

SEQ ID NO: 90 - protein, 831 aa, Chlamydomonas reinhardtii
MLTPLSYPIINTVSSSLPALHAMSQMLLEKTMRRGLATVSAAASSAVGRPIPMAVRSPMRSMAAASAAAEALPVAPSHSCAADPDKHPHLPDPRPKPAVDAGINVQKYVQDNYTAYAGNSSFLAGPTDNTKKLWSELEKMIATEIEKGVMDVDPSKPSTITAFPPGYIDKDLETVVGLQTDAPLKRAIKPLGGVNMVKAALESYGYTPDPEVARLYSTVRKTHNSGVFDAYTDEMRAARKSGILSGLPDGYGRGRIIGDYRRVALYGVDALIKAKKTDLKHNLLGVMDEEKIRLREEVNEQIRALSELKEMGAAYGFDLSRPAANSREAVQWLYFGYLGAVKEQDGAAMSLGRIDAFLDTYFERDLKAGTITEAEVQELIDHFVMKLRIVRQLRTPEYNALFAGDPTWVTCVLGGTDASGKAMVTKTSFRLLNTLYNLGPAPEPNLTVLWNDNLPAPFKEFCAKVSLDTSSIQYESDNLMSKLFGSDYSIACCVSAMRVGKDMQYFGARANLPKLLLYTLNGGRDEVSGDQVGPKFAPVRSPTAPLDYEEVKAKIEDGMEWLASMYANTMNIIHYMHDKYDYERLQMALHDTHVRRLLAFGISGLSVVTDSLSAIKYAQVTPVIDERGLMTDFKVEGSFPKYGNDDDRVDEIAEWVVSTFSSKLAKQHTYRNSVPTLSVLTITSNVVYGKKTGSTPDGRKKGEPFAPGANPLHGRDAHGALASLNSVAKLPYTMCLDGISNTFSLIPQVLGRGGEHERATNLASILDGYFANGGHHINVNVLNRSMLMDAVEHPEKYPNLTIRVSGYAVHFARLTREQQLEVIARTFHDTM

SEQ ID NO: 91 - DNA, 2338 bp, Pyromyces sp. E2
atggaaagcttagctttatccaatgtcagtgttcttgctaacactgtttctgttaacggttgctgccaccaaggtcgctggtgtcagaatggccaagccatcccgcgctcttcacaccagctatgaagactactcttaagacttctaagaaggtcccagctatgcaagctaagatacgccactcaagctccatgcatcaccaacgatgctgctgccaagagtgaaatcgatggaaggttggattaagaagcactacaccccatacgaaggtgatggttctttccttgctgccaactgaaaagaccaagaagcttttcgccaaggctgaagaatacttagctaaggaacgccaacggtggtttatacgatgttgacccacacactccatccaccatcacttcccacaccaggttaccttgacaaagataacgaagttatctacggttaccaaactgatgttccacaagagagccattaagccattcggtggtgttaacatggttaagaacgctcttaaggctgaacgttccaatggacaaggaagtcgaacacattttcactgactaccgtaagactcacaactgctgtcttcgatctttactccaaggaaatgagatctggtcgttccaacgctatcaaccggtttaccagatggttacggtcgtggtcgtattattggtgattaccgtcgtgttgctttacggtactgaccgtcttatcgcccaaaagaacaaggataaggccgaactccaaaagacaaatggacgaaccaaccatgaagctcattggtgaagttgctgatcaagttaaggcttaagcaacttactcaaatggccaagtcctacggtattgatatctctaagccagctaaacgccagagaagctactcaatttgtttactttggttacttaggttctatcaaggaacgatggtgctgccatgtctcttggtcgtgttgatgccttccttgattgtttctttgaaagatttaaagaacggtgttatcactgaagctgaagctcaagaaatcattgataaccttacttaagttacgtttcgctcgtcacttacgtaccccagaatacaacgacttattcgctggatccaacctgggttactatgtctcttggtggtatgggatctgatggtcgtaccttagactaagacttccttccgtgtccttaacactctctacaacttaggtccagctccagaacaacattactgtcctctggaacaaggctcttccaaagaacttcaaggacttcgccactagtttctattgatacctcttccatccaatacgaatccgatgctcttatgtctgccagatggtgatgactacggtattgcttgctgtgtctctgccatgagaattggtaaggatatgcttcttcggtgctcgttgtaaccttgccaagcttatgctttacgtccttaaccacggtagatgaaagaactggtaagcaagtcggtccagactttggtccagttccagaaggtccaaccattcgactggatgtgggaaacctatgacaaggctatggactggattgccaagctctgttaacaccatgaacgttatccacttctgtcacgaccaatactgttacgaatcccttcatggctcttcacgataccgatgtccgtcgtcttatggccttcggtgttgctggtctttgttgttgctgattccttctctgctattaagtacgctaaggttaccccagtccgtgatgaagactggtttaactgttgacttcaagattgaaggtgaattcccaaaattcggtaatggatgaccgtgttgatttcttcgccagaactgttactgacaagcttatcaacaagctcaaagaccccaacctaccgtggtgctactcacactctttctattcttaccattacctctagtcgtttacggtaagaagactggttctactccagatggtcgtaaggctggtcaaccatgctccaggttgtaacccaatgcacggtcgtgaattctctggtgccgttgcttctcttttctgtcgctaaggttaactacgactcttgtatggatggtatctctaacaccttctctagttccaaacactattggtaagtccttacaagaacgtcaaggtaacctttccggtttatgatggttacttcaccaagggtgcccaccaccttaacgttaacgttcttaagcgtgaaattagaagacgccatggcccacccagaaaactatccaaaccttactattcgtgtctctgtacgctgtcaactttgttaagttaactccacaacaacaaaaggaagttattgcccgtattccacgaaaagatgtaa

SEQ ID NO: 92 - protein, 805 aa, Pyromyces sp. E2
MESLALSNVSVLANTVSVNAVAATKVAGVRMAKPSRALHTPAMKTTLKTSKKVPAMQAKTYATQAPCITNDAAAKSEIDVEGWIKKHYTPYEGDGSFLAGPTEKTKKLFAKAEEYLAKERANGGLYDVDPHTPSTITSHKPGYLDKDNEVIYGYQTDVPLKRAIKPFGGVNMVKNALKAVNVPMDKEVEHIFTDYRKTHNTAVFDLYSKEMRSGRSNAIMTGLPDGYGRGRIIGDYRRVALYGTDRLIAQKNKDKAELQKRQMDEPTMKLIGEVADQVKALKQLTQMAKSYGIDISKPAKNAREATQFVYFGYLGSIKEQDGAAMSLGRVDAFLDCFFENDLKNGVITEAEAQEIIDNLILKLRFARHLRTPEYNDLFAGDPTWVTMSLGGMGSDGRTLVTKTSFRVLNTLYNLGPAPEPNITVLWNKALPKNFKDFATKVSIDTSSIQYESDALMSARFGDDYGIACCVSAMRIGKDMQFFGARCNLAKLMLYVLNHGKDERTGKQVGPDFGPVPEGPIPFDWMWETYDKAMDWIAKLYVNTMNVIHFCHDQYCYESLQMALHDTDVRRLMAFGVAGLSVVADSFSAIKYAKVTPVRDAKTGLTVDFKIEGEFPKFGNDDDRVDFFARTVTDKLINKLRKTPTYRGATHTLSILTITSNVVYGKKTGSTPDGRKAGQPFAPGCNPMHGREFSGAVASLSSVAKVNYDSCMDGISNTFSIVPNTIGKSLQERQGNLSGLLDGYFTKGAHHLNVNVLKRETLEDAMAHPENYPNLTIRVSGYAVNFVKLTPQQQKEVIARTFHEKM

SEQ ID NO: 93 - DNA, 2334 bp, Neocallimastix frontalis
gcttagctttatccaacgtcagtgttcttgctaacactgtttctattaacgctgttgcccaccaaggtcgctggtgtcagaatggctaaaccaactcgtgctcttcacactccagctgaagactactcttaaggcttccaagaaggctgctgttccagtcatgcaagccaagacacgctactgctccagttatcactaacgatgctgctgccaagagcgaaatcgatgtcgagttggattaagaagcactatactccatacgaaggtgatggttctttccttgctggtccctgaaaagactaagaagcttttcgccaaggctgaagaatacttagccaaggaacgtgcacggtggtttatacgatgttgacccacacactccatctactattacctcccacaagccgttaccttgacaaagaaaacgaagttatttacggttaccaaactgatgttcctcttaagagccatcaagccattcggtggtgttaacatggttaagaacgctcttaaggctgttaattccaatggacaaggaagtcgaacacattttctctgactaccgtaagactcacaacacctgtcttcgatatctactctaaggaaatgagagctggtcgttccaacgctatcatgacgtttaccagatggttacggtcgtggtcgtattattggtgattaccgtcgtgttgccctacggtactgaccgtcttatcgcccaaaaggaaaaagataaggctgaactccaaaagaaaaatggacgaaccaaccatgaaattaattggtgaagttgctgaccaagttaaggctctagcaacttactcaaatggctaagtcctacggtattgatattaccaagccagccaagaaccagagaagctactcaatttgtttacttcggttacttaggttctatcaaggaacaagagtgctgccatgtctcttggtcgtgttgatgctttcttagattgtttctttgaaaacgataaagaatggtgttatcactgaatctgaagctcaagaaatcattgataaccttatcttagttacgtttcgctcgtcacttacgtactccagaatacaacgacttattcgctggtgacaacctgggttactatgtctcttggtggtatgggtagtgatggtcgtaccttagttacagacttccttccgtgttcttaacactctttacaacttaggtccagctccagaaccaaatcactgtcctctggaacaagaaccttccaaagaacttcaaggacttcgctactaaggtctattgatacctcttccattcaatacgaatctgatgcccttatgtccgctagattcggatgattacggaattgcctgctgtgtttctgccatgagaattggtaaggatatgcaatttcggtgctcgttgtaaccttgctaagcttatgctttacgtccttaaccatggtaaggaaaagaactggtaagcaagttggtccagacttcggtccagttccagaaggtccaattcctcgactggatgtgggaaacttatgacaaggctatggattggattgccaagctttacgtacaccatgaacgttattcacttctgtcacgaccaatactgttacgaatctcttcaaatctcttcacgataccgatgtccgtcgtcttatggccttcggtgttgctggtctttctgtttgctgattccttctctgctattaagtacgctaaggttactccaatccgtgatccaaaccggtttaactgttgacttcaaggttgaaggtgaattcccaaaattcggtaacgatgaaccgtgttgacttcttcgccagaactgttactgacaagcttattaacaagttaagaaactccaacctaccgtggtgctacccacactctttctattcttaccattacctctaacgttttacggtaagaagaccggttctactccagatggtcgtaaggctggtcaaccattcgccaggttgtaacccaatgcacggtcgtgaattctctggtgccgttgcttctctttcttcttgctaaggttaactacgattcttgtatggatggtatctctaacaccttctctattgtcaaacactatcggtaagactttacaagaacgtcaaggtaacctttctggtttattagagttacttcagcaagggtgctcaccatcttaacgttaacgttcttaagcgtgaaactttaagatgccatggctcacccagaaaactatccaaaccttactatccgtgtttctggttactgtcaacttcgttaagttaactccagcccaacaaaaggaagttattgcccgtaccttacgaaaagatgtaa

SEQ ID NO: 94 - protein, 803 aa, Neocallimastix frontalis
LALSNVSVLANTVSINAVAATKVAGVRMAKPTRALHTPAMKTTLKASKKAAVPVMQAKTYATAPVITNDAAAKSEIDVEGWIKKHYTPYEGDGSFLAGPTEKTKKLFAKAEEYLAKERANGGLYDVDPHTPSTITSHKPGYLDKENEVIYGYQTDVPLKRAIKPFGGVNMVKNALKAVNVPMDKEVEHIFSDYRKTHNTAVFDIYSKEMRAGRSNAIMTGLPDGYGRGRIIGDYRRVALYGTDRLIAQKEKDKAELQKKQMDEPTMKLIGEVADQVKALKQLTQMAKSYGIDITKPAKNAREATQFVYFGYLGSIKEQDGAAMSLGRVDAFLDCFFENDLKNGVITESEAQEIIDNLILKLRFARHLRTPEYNDLFAGDPTWVTMSLGGMGSDGRTLVTKTSFRVLNTLYNLGPAPEPNITVLWNKNLPKNFKDFATKVSIDTSSIQYESDALMSARFGDDYGIACCVSAMRIGKDMQFFGARCNLAKLMLYVLNHGKDERTGKQVGPDFGPVPEGPIPFDWMWETYDKAMDWIAKLYVNTMNVIHFCHDQYCYESLQMALHDTDVRRLMAFGVAGLSVVADSFSAIKYAKVTPIRDPKTGLTVDFKVEGEFPKFGNDDDRVDFFARTVTDKLINKLRKTPTYRGATHTLSILTITSNVVYGKKTGSTPDGRKAGQPFAPGCNPMHGREFSGAVASLSSVAKVNYDSCMDGISNTFSIVPNTIGKTLQERQGNLSGLLDGYFSKGAHHLNVNVLKRETLEDAMAHPENYPNLTIRVSGYAVNFVKLTPAQQKEVIARTFHEKM

SEQ ID NO: 95 - DNA, 2533 bp, Clostridium phytofermentans
atgacgaaaaaagtggaattacagacaactggattagtagactctctcgaagcattaagcaaaatttagagagttaaaagaagcacaagagctctttgctacctacactcaagagcgtagataaaatcttctttgctgctgccatggctgccaatcagcaacgtattccgttagaagatggctgtagaagaaacgggtatgggtattgtagaagataaagtaattaagaatctatgctgcagagtatatttacaatgcatacaaagatacaaaaacatgtggagtggttggaagatcctagcttcggtatcaaaaaaattgcagagccaatcggcgtagttgcagctgatcccaactaccaatcctacctccactgctatctttaaaacattactttgtttaaagacgtaacgcaatcatcatcagcccacatcctcgtgctaagaactgtaccatcgcagctgaaggtagttttagatgctgcagttgctgcaggtgctcctgctggtataattggatggagatgttccatcacttgaattaaccaatgaagttatgaaaaatgcagacatcatccttgactggtggacctggtatggtaaaggctgcttattcttctggtaaaccagcacttggtgggcgcaggtaatacccctgttattatggatgaaagctgcgatgttcgccttgcagtaatctattattcactctaagacatttgataacggtatgatttgtgcttccgagcaatccgattattagtgataagatttatgaagctgctaagaaagaattcaaggatcgtggttgccatctgctccccagaagagactcagaagcttcgtgaaacaatcctaattaatggtgctcaacgctaaaattgttggacaaagcgctcatacgattgcaaagcttgcaggatttgatggcagaagctgctaagattttaattggtgaagtagaatccgttgaactagaagaacaatgcacacgagaaactttctccagttcttgctatgtacaaatcaaaatcctttgatgatggtaagcaaagctgctcgtcttgttgcagatggcggttatggccatacttcttccatctattaatgtaggtaccggacaagaaaagattgcaaagttttctgatgctatgaagacttcgtattcttgtaaatacaccatcctcccatggtggtatcggtgacctttataactttattagctccatctcttactcttggttgtggctcctggggcggtaactctgtatcagaaagtaggagtaaagcacttaatcaacattaagacagttgctgagaggagagaaaacatgctggtttagagcacctgagaaagtatactttaagaagggttgtttaccagtagccctcggaattaaaagatgtaatgaataaaaagaaagtattcattgtaaccgatgctttcctttaaaaatggctatacaaaatgtgttactgatcagttagatgctatgggaattcagcataacttactatgatgttgctccagatccatctttagctagtgctacagaaggtgcagaagatgagactcttcgagccagactgtattatcgcactcggtggtggttctgcaatggatgggaaagattatgtgggttatgtatgaacaccctgaagtaaacttccttgaccttgcaacgtttcatggatattagaaagcgtgtttactccttccctaagatgggcgaaaaagctttttatcgcagttccaacttcctccggtactggttctgaagttacaccatttgctgttaaccgatgagagaactggcgtaaaatatccacttgcagattacgaattacttcctaagagctattattgatgccgatatgatgatgaatcaacctaagggattaacttctgcttccgattgatgcccttacccatgcattagaggcatatgcttctatcatggctactgactatagatggtttagcattaaaagctatgaagaatatcttcgcttaccttccaagcgcatatgaatggtgccgctgatccggttgcaagagaaaagatggcagatgcttctaccttagctgatggcattcgcaaatgcattcttaggaatttgccactccatggctcataaattaggtgttccaccacttaccacacggtgtagcaaacgcactcttaatcaacgaagtaatgcgctaactccgttagcattcctacaaagatgggtactttctctcaataccaatacccacatgttagatcgttatgtagaatgtgcgaacttcttaggtattgccggaaagaacgacaatgaaattcgaaaaccttcttaaggcaattgatgaattaaaagaaaaagttggtatcaagatccatcaaagaatatggcgtagacgagaaatatttcttagatactttagatgctatgggaacaggctttcgatgatcagtgtactggtgctaacccaagatatccattaatgaaggatcaaggaaatctatcttaaagtgtactacggtaaataa

SEQ ID NO: 96 - protein, 872 aa, Clostridium phytofermentans
MTKKVELQTTGLVDSLEALTAKFRELKEAQELFATYTQEQVDKIFFAAAMAANQQRIPLAKMAVEETGMGIVEDKVIKNHYAAEYIYNAYKDTKTCGVVEEDPSFGIKKIAEPIGVVAAVIPTTNPTSTAIFKTLLCLKTRNAIIISPHPRAKNCTIAAAKVVLDAAVAAGAPAGIIGWIDVPSLELTNEVMKNADIILATGGPGMVKAAYSSGKPALGVGAGNTPVIMDESCDVRLAVSSIIHSKTFDNGMICASEQSVIISDKIYEAAKKEFKDRGCHICSPEETQKLRETILINGALNAKIVGQSAHTIAKLAGFDVAEAAKILIGEVESVELEEQFAHEKLSPVLAMYKSKSFDDAVSKAARLVADGGYGHTSSIYINVGTGQEKIAKFSDAMKTCRILVNTPSSHGGIGDLYNFKLAPSLTLGCGSWGGNSVSENVGVKHLINIKTVAERRENMLWFRAPEKVYFKKGCLPVALAELKDVMNKKKVFIVTDAFLYKNGYTKCVTDQLDAMGIQHTTYYDVAPDPSLASATEGAEAMRLFEPDCIIALGGGSAMDAGKIMWVMYEHPEVNFLDLAMRFMDIRKRVYSFPKMGEKAYFIAVPTSSGTGSEVTPFAVITDERTGVKYPLADYELLPKMAIIDADMMMNQPKGLTSASGIDALTHALEAYASIMATDYTDGLALKAMKNIFAYLPSAYENGAADPVAREKMADASTLAGMAFANAFLGICHSMAHKLGAFHHLPHGVANALLINEVMRFNSVSIPTKMGTFSQYQYPHALDRYVECANFLGIAGKNDNEKFENLLKAIDELKEKVGIKKSIKEYGVDEKYFLDTLDAMVEQAFDDQCTGANPRYPLMKEIKEIYLKVYYGK

SEQ ID NO: 97 - DNA, 2588 bp, Escherichia coli
atggctgttactaatgtcgctgaacttaacgcactcgtagagcgtgtaaaaaaagccccgtgaatatgccagtttcactcaagagcaagtagacaaaatcttccgcgccgccgctcgctgctgcagatgctcgaatcccactcgcgaaaatggccgttgccgaatccggcatggatcgtcgaagataaagtgatcaaaaaccactttgcttctgaatatatctacaacgcctaaagatgaaaaaacctgtggtgttctgtctgaagacgacacttttggtaccatcactagctgaaccaatcggtattatttgcggtatcgttccgaccactaacccgacttcaactgatcttcaaatcgctgatcagtctgaagacccgtaacgccattatcttctccccgcacccgtgcaaaagatgccaccaacaaagcggctgatatcgttctgcaggctgctatcgctgggtgctccgaaagatctgatcggctggatcgatcaaccttctgttgaactgtctaacgctgatgcaccacccagacatcaacctgatcctcgcgactggtggtccgggcatggttagccgcatacagctccggtaaaccagctatcggtgtaggcgcgggcaacactccagttgatcgatgaaactgctgatatcaaacgtgcagttgcatctgtactgatgtccaaaacctgacaacggcgtaatctgtgcttctgaacagtctgttgttgttgttgactctgtttatggctgtacgtgaacgttttgcaacccacggcggctatctgttgcagggtaaagagctgagctgttcaggatgttatcctgaaaaacggtgcgctgaacgcggctatcgttggtcagcgcctataaaattgctgaactggcaggcttctctgtaccagaaaacaccaagattctgaggtgaagtgaccgttgttgatgaaagcgaaccgttcgcacatgaaaaactgtccccgactggcaatgtaccgcgctaaagatttcgaagacgcggtagaaaaagcagagaaactgggctatgggcggtatcggtcatacctcttgcctgtacactgaccaggataaccaaccggcgcgtttcttacttcggtcagaaaatgaaaacggcgcgtatcctgattaacaccccagtctcagggtggtatcggtgacctgtataacttcaaactcgcaccttccctgactctggtgtggttcttggggtggtaactccatctctgaaaacgttggtccgaaacacctgatcaaagaaaaccgttgctaagcgagctgaaaacatgttgtggcacaaacttccgaaatctatacttccgccgtggctccctgccaatcgcgctggatgaagtgattactgatggccacacgtgcgctcatcgtgactgaccgcttcctgttcaacaatggttatgctgatcagatcatccgtactgaaagcagcaggcgttgaaactgaagtcttcttcgaagtagaagcggaccaccctgagcatcgttcgtaaaggtgcagaactggcaaactccttcaaaccagacgtgaatcgcgctgggtggtggttccccgatggacgccgcgaagatcatgtgggttatgtacgcatccggaaactcacttcgaagagctggcgctgcgctttatggatatccgtaaacgtatacaagttcccgaaaatgggcgtgaaagcgaaaatgatcgctgtcaccaccacttctgacaggttctgaagtcactccgtttgcggttgtaactgacgacgctactggtcagaaatccgctggcagactatgcgctgactccggatatggcgattgtcgacgccaacctggttagacatgccgaagtccctgtgtgctttcggtggtctggacgcagtaactcacgccatgggcttatgtttctgtactggcatctgagttctctgatggtcaggctctgcaggcactgactgctgaaagaatatctgccagcgtcctaccacgaagggtctaaaaatccggtagcgcgaacgtgttcacagtgcagcgactatcgcgggtatcgcgtttgcgaacgccttcctgggtatgtcactcaatggcgcacaaactgggttcccagttccatattccgcacggtctggaacgccctgctgatttgtaacgttattcgctacaatgcgaacgacaacccgaccaagcactgcattcagccagtatgaccgtccgcaggctcgccgtcgttatgctgaaattgccgcacttgggtctgagcgcaccgggcgaccgtactgctgctaagatcgagaaactgctggtggctggaaacgctgaaagctgaactgggtattccgaaatctatccgtgaagctggcgcaggaagcagacttcctggcgaacgtggataaactgtctgaagatgcattcgatgacctgcaccggcgctaacccgcgttacccgctgatctccgagctgaaacagattctgctggacctactacggtcgtgattatgtagaaggtgaaactgcagcgaagaaagaagctgctcgctaaagctgagaaaaaagcgaaaaaatccgcttaa

SEQ ID NO: 98 - protein, 891 aa, Escherichia coli
MAVTNVAELNALVERVKKAQREYASFTQEQVDKIFRAAALAAADARIPLAKMAVAESGMGIVEDKVIKNHFASEYIYNAYKDEKTCGVLSEDDTFGTITIAEPIGIICGIVPTTNPTSTAIFKSLISLKTRNAIIFSPHPRAKDATNKAADIVLQAAIAAGAPKDLIGWIDQPSVELSNALMHHPDINLILATGGPGMVKAAYSSGKPAIGVGAGNTPVVIDETADIKRAVASVLMSKTFDNGVICASEQSVVVVDSVYDAVRERFATHGGYLLQGKELKAVQDVILKNGALNAAIVGQPAYKIAELAGFSVPENTKILIGEVTVVDESEPFAHEKLSPTLAMYRAKDFEDAVEKAEKLVAMGGIGHTSCLYTDQDNQPARVSYFGQKMKTARILINTPASQGGIGDLYNFKLAPSLTLGCGSWGGNSISENVGPKHLINKKTVAKRAENMLWHKLPKSIYFRRGSLPIALDEVITDGHKRALIVTDRFLFNNGYADQITSVLKAAGVETEVFFEVEADPTLSIVRKGAELANSFKPDVIIALGGGSPMDAAKIMWVMYEHPETHFEELALRFMDIRKRIYKFPKMGVKAKMIAVTTTSGTGSEVTPFAVVTDDATGQKYPLADYALTPDMAIVDANLVMDMPKSLCAFGGLDAVTHAMEAYVSVLASEFSDGQALQALKLLKEYLPASYHEGSKNPVARERVHSAATIAGIAFANAFLGVCHSMAHKLGSQFHIPHGLANALLICNVIRYNANDNPTKQTAFSQYDRPQARRRYAEIADHLGLSAPGDRTAAKIEKLLAWLETLKAELGIPKSIREAGVQEADFLANVDKLSEDAFDDQCTGANPRYPLISELKQILLDTYYGRDYVEGETAAKKEAAPAKAEKKAKKSA

SEQ ID NO: 99 - DNA, 2771 bp, Chlamydomonas reinhardtii
atgatgtcctccagcctcgtctctggcaagagggttgccgtgccctctgctgccaagctgtgctgctgtgccgctgccccgcgtggccggtcgccggactgctgcacgcgttgtctgaggctgctccctctggcgccgcccctgccagccccaaggctgaggctgctgcgcccggccgctgccccggccaccccccatgctgaggtgaagaaggagcgcgccccagccaccggaggcgctgacggagctgaaggcgctgctgaagcgcgcccagaccgcccaggcgcagttccacctacacccaggagcaggtggacgagatcttccgcgccgccgccgaggccgccagccgcccgtatccccctggccaagatggccgtggaggagacccgcatgggcgtggctggacaaggtggtgaagaaccacttcgcctccgagttcatctacaacaagtacaagcacaaagacctgcggcgtcatcgagcacgaccccgccggcggcatccagaaggtggctgagcgtgggcgtcattgccggtatcgtgcccaccaccaaccccacctccaccgccatcttcatcgctgctgtcgctcaagacccgcaacgcgctggtgctgtgcccgcacccccgcgccgaagagcaccatcgccgccgcgcgcatcgtgcgtgacgccgccgtggccgccggcgcgccccaacatcatcagctgggtggagacgccctcgctgccggtgtcccaggcgctgatgcgcgactgagatcaacctcatcctggccaccggtggcccggccatggtgcgcgccgccttcgtccggcaacccgtcgctgggtgtgggcgccggcaacaccccggccctgattgacgactgccgacgtggccatggccgtgtcctccatcctgctgtccaagacctttgacaacggtcatctgcgcctcggagcagtcggtggtggtggtggccaaggcctacgacgccgtgcaccgagttcgtgcgccgcggggcctacttcctgaccgaggacgacaaggtcaaggtccgccggtgtggttgtggacggcaagctgaaccccaacattgtgggccagtccatccccactggcggccctgttcggcatcaaggtgccccagggcaccaaggtgctcatcggcgagggagaagatcggccccgaggaggcgctgtcgcaggagaagctgtgccccatcctggccataccgggcgcccgactacgaccacggcgtcaagatggcctgcgagctcatcatgtacgggcgccggccacacctcggtgctgtacaccaacccgctcaacaacgcccacatccagctaccagagcgcggtcaagaccgtgcgcatcctcatcaacacccccgcctcgcagggcgattggtgacctgtacaacttccacctggacccctccctcaccctgggctgcggcacctggctccacctcggtgtccaccaacgtgggcccgcagcacctgctgaacatcaagaccgaccgcgcgccgcgagaacatgctgtggttccgcgtgccgcccaagatctacttcaaggggctgcctggaggtggcgctgaccgatctgcgtggcaaatcgcgcgctttcattgtcagacaagccgctttttgacatgggatacgccgacaaggtcacccacatcctggacagcaaacgtgcaccaccaggtgttctaccacgtgacccccgacccgaccctggcctgcattggcgggtctgaaggagatcctggagttcaagcccgatgtcatcatcgcgctgggtggtgtcgcccatggacgccgccaagatcatgtggctgatgtacgagtgccccgacacccgctgacggcctggccatgcgcttcatggacatccgcaagcgcgtgtacgaggtgccggagcggcaagaaggccaccatggtgtgcatccccaccaccagtggcaccggctcggaggtgacccttctcggtggtcaccgacgagcgcctgggcgccaagtaccccctggccgattacgctgacccccagcatggccattgtggacccccagctggtgctcaacatgcccaagaagcaccgcctggggcggcattgacgcgctcacgcacgcgctggagagctacgtgtccatctgccaccgactacaccaagggtctgtcgcgcgaggccatcagcctgctgttcaagtaccccccgcgcctacgccaacggctccaacgactacctggcgcgtgagaaggtgcactacggccacgattgccggcatggccttcgccaacgccttcctgggcatctgccactccatggcacaagctgggcgccgcctaccacgtgcctcacggcctggccaacgccgcgctgatcacacgtcatccgctacaacgccaccgacatgcccgccaagcaggccgccttcccgcagtgagtaccccaccgccaagcaggactacgccgacctggccaacatgctgggcctgggcgaacacggtggacgagaaggtgatcaagctgattgaggcggtggaggagctcaaggccagtggacatcccgcccaccatcaaggagatcttcaacgaccccaaggtggacgccgactctggcgaacgtggacgccctggccgaggacgccttcgacgaccagtgcacgggcgccaccgcgctacccgctcatggccgacctgaagcagctctacctggacgcccacgccgcgcatcctgcccgtcaagaccctggagttcttctccaagatcaactaa

SEQ ID NO: 100 - protein, 954 aa, Chlamydomonas reinhardtii
MMSSSLVSGKRVAVPSAAKPCAAVPLPRVAGRRTAARVVCEAAPSGAAPASPKAEAAAPVAAAPATPHAEVKKERAPATDEALTELKALLKRAQTAQAQYSTYTQEQVDEIFRAAAEAANAARIPLAKMAVEETRMGVAEDKVVKNHFASEFIYNKYKHTKTCGVIEHDPAGGIQKVAEPVGVIAGIVPTTNPTSTAIFKSLLSLKTRNALVLCPHPRAAKSTIAAARIVRDAAVAAGAPPNIISWVETPSLPVSQALMQATEINLILATGGPAMVRAAYSSGNPSLGVGAGNTPALIDETADVAMAVSSILLSKTFDNGVICASEQSVVVVAKAYDAVRTEFVRRGAYFLTEDDKVKVRAGVVVDGKLNPNIVGQSIPKLAALFGIKVPQGTKVLIGEVEKIGPEEALSQEKLCPILAMYRAPDYDHGVKMACELIMYGGAGHTSVLYTNPLNNAHIQQYQSAVKTVRILINTPASQGAIGDLYNFHLDPSLTLGCGTWGSTSVSTNVGPQHLLNIKTVTARRENMLWFRVPPKIYFKGGCLEVALTDLRGKSRAFIVTDKPLFDMGYADKVTHILDSINVHHQVFYHVTPDPTLACIEAGLKEILEFKPDVIIALGGGSPMDAAKIMWLMYECPDTRFDGLAMRFMDIRKRVYEVPELGKKATMVCIPTTSGTGSEVTPFSVVTDERLGAKYPLADYALTPSMAIVDPQLVLNMPKKLTAWGGIDALTHALESYVSICATDYTKGLSREAISLLFKYLPRAYANGSNDYLAREKVHYAATIAGMAFANAFLGICHSMAHKLGAAYHVPHGLANAALISHVIRYNATDMPAKQAAFPQYEYPTAKQDYADLANMLGLGGNTVDEKVIKLIEAVEELKAKVDIPPTIKEIFNDPKVDADFLANVDALAEDAFDDQCTGANPRYPLMADLKQLYLDAHAAPILPVKTLEFFSKIN

SEQ ID NO: 101 - protein, 2570 aa, Piromyces sp. E2
ATGTCCGGATTACAAATGTTCCAAAACCTTTCTCTTTACGGTAGTCTCGCCGAAATCGACTAGCGAAAAGCTTAACGAAGCTATGGACAAATTAACTGCTGCCCAAGAACAATTCAGAATACAACCAAGAACAAGTTGACAAAATCTTCAAGGCTGTTGCTTTAGCTGCTTCTCAACCGTGTTGCTTTCGCTAAGTACGCACACGAAGAAACCCAAAAGGGTGTTTTCGAAGAAGGTTATCAAGAACGAATTCGCTGCTGATTACATTTACCACAAGTACTGCAATGACAACCGCCGGTATCATTGAATATGATGAAGCCAATGGTCTTATGGAAATTGCTGAACCAGGGTCCAGTTGTTGGTATTGCTCCAGTTACTAACCCAACTTCTACTATCATCTACAAGTTTAATTGCCTTAAAGACCCGTAACTGTATTATCTTCTCACCACATCCAGGAGCTCACAGCCTCTGTTTTCGTTGTTAAGGTCTTACACCAAGCTGCTGTTAAGGCTGGTGCCCCAGAACTGTATTCAAATCATCTTCCCAAAGATGGATTTAACTACTGAATTATTACACCACCAAGACTCGTTTCATTTGGGCTACTGGTGGTCCAGGTTTAGTTCACGCCTCTTACACTTGGTAAGCCAGCTCTTGGTGGTGGTCCAGGTAATGCTCCAGCTCTTATTGATGAAACTTGATATGAACGAAGCTGTTGGTTCTATCGTTGTTTCTAAGACTTTCGATTGTGGTATGATGTGCCACTGAAAACGCTGTTGTCGTTGTCGAATCTGTCTACGAAAACTTCGTTGCTAATGAAGAAGCGTGGTGCCTACTTCATGACTCCAGAAGAAACCAAGAAGGCTTCTAACCCTTTTCGGAGAAGGTATGAGATTAAATGCTAAGGCTGTTGGTCAAACTGCCAAGACTTGCTGAAATGGCCGGTTTCGAAGTCCCAGAAAACACCGTTGTTCTCTGTGGTGAAGCTTGAAGTTAAATTCGAAGAACCAATGGCTCACGAAAAGTTAACTACTATCCTCGGTATCTAAGGCTAAGGACTTTGACGATGGTGTCAGATTATGTAAGGAATTAGTTACTTTCGGTGAAGGGTCACACTGCTGTTCTCTACACCAACCAAAACAACAAGGACCGTATTGAAAAGTCAAAACGAAGTTCCAGCCTTCCACATCTTAGTTGACATGCCATCTTCCCTCGGTTGTAGGTGATATGTACAACTTCCGTCTTGCTCCAGCTCTTACCATTACTTGTGGTACTATGGGGTGGTTCCTCCTCTGATAACATTGGTCCAAAGCACTTACTTAACATCAAGCGTGTTGATGAGACGCGAAAACATGCTTTGGTTCAAGATTCCAAAGTCTGTCTACTTCAAGCGTGATCCTTTCTGAAGCTTTATCTGACTTACGTGACACCCACAAGCGTGCTATCATTATTAGATAGAACTATGACTATGTTAGGTCAAACTGACAAGATCATTAAGGCTTGTGAAGGTCGGTATGGTCTGCACTGTCTACGATAAGGTTGTCCCAGATCCAACTATCAAGTGTATTAGAAGGTGTTAATGAAATGAACGTCTTCAAGCCAGATTTAGCTATTGCTCTTGGTGGTGTCTGCTATGGATGCCGCTAAGATGATGCGTTTATTCTACGAATACCCAGACCAAGACTCAAGATATTGCTACTCGTTTCGTCGATATCCGTAAGCGTGTTGTTGGTTGTCCAAAGCGGTAGACTTATTAAGACTCTTGTCTGTATCCCAACTACCTCTGGTACTGGTGCCGAAGACTCCATTCGCTGTCGTTACCTCTGAAGAAGGTCGTAAGTACCCATTAGTCGACTACGCTTACTCCAGATATGGCTATTGTTGATCCAGAATTCGCTGTTGGTATGCCAAAGCGTTACTTCTTGGACTGGTATTGATGCTCTTACCCACGCCATTGAATCTTACGTTTCTATTAGCTACTGACTTCACTAGACCATACTCTCTCCGTGCTGTTGGTCTTATCTTCGAATCCCTCCCTTGCTTACAACAACGGTAAGGATATTGAAGCTCGTGAAAAGATGCACAATGCTTGCTATTGCTGGTATGGCCTTTGCCAACGCTTTCCTTGGTTGTTGTCACTCTGTTGCTCCAACTTGGTTCCGTCTACCACATTCCACACGGTCTTGCCAACGCTTTAATGCTTTCTCATCATTAAGTACAACGCTACTGACTCTCCAGTTAAGATGGGTACCTTCCCACAATACATACCCACAAGCTATGCGTCACTACGCTGAAATTGCTGAACTCTTATTACCACCAACTCGTTGTTAAGATGACTGATGTTGATAAGGTTCAATACTTAATTGACCGTGTTGAACAATAAGGCTGACGTTGGTATTCCAAAGTCTATTAAGGAAACTGGAATGGTTACTGAAGAAGTTCTTCAACAAGGTTGACCAAGTTGCTATCATGGCCTTCGATGACCAATGTACTGGTGAACCCACGTTACCCATTAGTTTCTGAATTAAAACAATTAATGATTGATGCCTGGAACGGTTGTCCCAAAGCTCTAA

SEQ ID NO: 102 - protein, 885 aa, Piromyces sp. E2
MSGLQMFQNLSLYGSLAEIDTSEKLNEAMDKLTAAQEQFREYNQEQVDKIFKAVALAASQNRVAFAKYAHEETQKGVFEDKVIKNEFAADYIYHKYCNDKTAGIIEYDEANGLMEIAEPVGPVVGIAPVTNPTSTIIYKSLIALKTRNCIIFSPHPGAHKASVFVVKVLHQAAVKAGAPENCIQIIFPKMDLTTELLHHQKTRFIWATGGPGLVHASYTSGKPALGGGPGNAPALIDETCDMNEAVGSIVVSKTFDCGMICATENAVVVVESVYENFVATMKKRGAYFMTPEETKKASNLLFGEGMRLNAKAVGQTAKTLAEMAGFEVPENTVVLCGEASEVKFEEPMAHEKLTTILGIYKAKDFDDGVRLCKELVTFGGKGHTAVLYTNQNNKDRIEKYQNEVPAFHILVDMPSSLGCIGDMYNFRLAPALTITCGTMGGGSSSDNIGPKHLLNIKRVGMRRENMLWFKIPKSVYFKRAILSEALSDLRDTHKRAIIITDRTMTMLGQTDKIIKACEGHGMVCTVYDKVVPDPTIKCIMEGVNEMNVFKPDLAIALGGGSAMDAAKMMRLFYEYPDQDLQDIATRFVDIRKRVVGCPKLGRLIKTLVCIPTTSGTGAEVTPFAVVTSEEGRKYPLVDYELTPDMAIVDPEFAVGMPKRLTSWTGIDALTHAIESYVSIMATDFTRPYSLRAVGLIFESLSLAYNNGKDIEAREKMHNASAIAGMAFANAFLGCCHSVAHQLGSVYHIPHGLANALMLSHIIKYNATDSPVKMGTFPQYKYPQAMRHYAEIAELLLPPTQVVKMTDVDKVQYLIDRVEQLKADVGIPKSIKETGMVTEEDFFNKVDQVAIMAFDDQCTGANPRYPLVSELKQLMIDAWNGVVPKL

SEQ ID NO: 103 - protein, 910 aa, Bifidobacterium adolescentis
MADAKKKEEPTKPTPEEKLAAAEAEVDALVKKGLKALDEFEKLDQKQVDHIVAKASVAALNKHLVLAKMAVEETHRGLVEDKATKNIFACEHVTNYLAGQKTVGIIREDDVLGIDEIAEPVGVVAGVTPVTNPTSTAIFKSLIALKTRCPIIFGFHPGAQNCSVAAAKIVRDAAIAAGAPENCIQWIEHPSIEATGALMKHDGVATILATGGPGMVKAAYSSGKPALGVGAGNAPAYVDKNVDVVRAANDLILSKHFDYGMICATEQAIIADKDIYAPLVKELKRRKAYFVNADEKAKLEQYMFGCTAYSGQTPKLNSVVPGKSPQYIAKAAGFEIPEDATILAAECKEVGENEPLTMEKLAPVQAVLKSDNKEQAFEMCEAMLKHGAGHTAAIHTNDRDLVREYGQRMHACRIIWNSPSSLGGVGDIYNAIAPSLTLGCGSYGGNSVSGNVQAVNLINIKRIARRNNNMQWFKIPAKTYFEPNAIKYLRDMYGIEKAVIVCDKVMEQLGIVDKIIDQLRARSNRVTFRIIDYVEPEPSVETVERGAAMMREEFEPDTIIAVGGGSPMDASKIMWLLYEHPEISFSDVREKFFDIRKRAFKIPPLGKKAKLVCIPTSSGTGSEVTPFAVITDHKTGYKYPITDYALTPSVAIVDPVLARTQPRKLASDAGFDALTHAFEAYVSVYANDFTDGMALHAAKLVWDNLAESVNGEPGEEKTRAQEKMHNAATMAGMAFGSAFLGMCHGMAHTIGALCHVAHGRTNSILLPYVIRYNGSVPEEPTSWPKYNKYIAPERYQEIAKNLGVNPGKTPEEGVENLAKAVEDYRDNKLGMNKSFQECGVDEDYYWSIIDQIGMRAYEDQCAPANPRIPQIEDMKDIAIAAYYGVSQAEGHKLRVQRQGEAATEEASERA

SEQ ID NO: 104 - protein, 870 aa, Bacillus coagulans
MAIDEKVVGKSAQITEMVDSLVAKGQKALREFMELDQAQVDNIVKQMALAGLEQHMVLAKMAVEETGRGVYEDKMTKNLFATEYIYHNIKYNKTVGIIDENNNEGIVKFAEPVGVIAGVTPVTNPTSTTMFKALIAIKTRNPIIFAFHPSAQKCSSHAAKVMLDAAVKAGAPENCIQWIEKPAIEATQQLMNHSGISLILATGGSGMVKSAYSSGKPALGVGPGNVPCYIEKSADIKRAVNDLILSKTFDNGMICASEQAVIIDKEIYDNVKNELIANQCYFLNEAEKKKVEKTVINEKTQSVNSAIVGKPAYEIAKMAGVNVPEDTKILIAELTGVGPDYPLSREKLSPVLACYKANSTKQGFEFAEAMLEFGGLGHSAVIHSTNDEVIEQYGLKMKAGRIIVNSPSSQGAIGDIYNAYMPSLTLGCGTFGGNSVSTNVGVINLYNVKTMAKRRVNMQWFKIPPRVYFEKNSVQYLEKMPDISSAFIVTDPDMVRLGFVEKVLYYLRKRPDYVHCEIFSEVEPDPSIETVRKGAAAMASFQPDVIIALGGGSAMDAAKGMWLFYEHPEVDFNELKQKFMDIRKRVAKFPKLGEKAQLVCIPTTSGTGSEVTSFAVISDKKNNTKYPLADYELTPDVAIIDPQFVMTVPKSVTADTGMDVLTHAIEAYVSNMANDYTDGLAIKAIQLVHEYLPKAYANGNDALAREKMHNASTLAGMAFSNAFLGINHSLAHKIGAEFHIPHGRANAILLPHVIRYNAQKPKKFAAFPKYEHFIADQRYAEIARVLGLPASTTEEGVESLCQEIIRMCKLFNIPLSLKAAGVNRADFEKRVAIIADRAFEDQCTPANPKLPLVSELEDILRKAFEGVEAK

SEQ ID NO: 105 - protein, 867 aa, Bacillus licheniformis
MAIEEKNMKQKQNASNMIDQLVEKGLKALEEFRSFDQEQIDEIVKQMALAGLDQHMPLAKLAVEETKRGVYEDKIIKNMFATEYVYHHIKYDKTVGIINENEHDGVIEIAEPVGVIAGVTPVTNPTSTTMFKSLISIKTRNPIVFAFHPSAQKCSREAARILRDAAVKAGAPDNCIQWIETPSLDATQALMTHPNVSLILATGGAGMVKSAYSSGKPALGVGPGNVPCYIEKSANLKQAVNDLILSKTFDNGMICASEQAVIIDKGIYSDVKAEMTRNNCYFLNKTEKSKVEKLVINENTCAVNADIVGMPAFKIAEMAGIKVPQDTKILIAELEGVGPDDPLSREKLSPVLACYKVSGLEEGLKRAEEMLAFGGTGHSAVIHTNDQEAVKEFGLRMKAGRIIVNAPSSQGAIGDIYNAYMPSLTLGCGTYGGNSVSSNVGAVHLINTKKVAKRNVNMQWFKVPPKIYFEKHATQYLAKMPDISKAFIVTDPGMVKLGYVDRALHYLRRRPDYVHCEIFSDVEPDPSIETVMNGVDMMAKFQPDVIIALGGGSAMDAAKGMWMFYEHPDAEFFGLKQKFLDIRKRIVKYPKLGGKAKFVAIPTTSGTGSEVTSFSVITDKETNTKYPLADYELTPDVAIIDPQFVMTVPKHITADTGMDVLTHAIESYVSCMANDYTDGLAMKAIQLIFEYLPRAYKNGSDELAREKVHNASTIAGMAFSNAFLGINHSLAHKLGAEFQIAHGRANAILLPHVIRYNAAKPKKFTAFPKYSHFIADQRYAEIARTLGLPAKTTAEGVESLIQEIISLAKELKIPMSIKQNGVDAAAFESKVDLMAERAFEDQCTTANPKLPLVSELAEIYRSAYKGV

SEQ ID NO: 106 - protein, 866 aa, Enterococcus faecium
MMAKVMEKEKTKTIDVQAMIDGLAEKANVALKEMESFDQEKVDHIVHEMAMAALDQHMPLAKMAVEETGRGVYEDKAIKNMYASEYIWHNIKHDKTVGVINEDVQKGLIEIAEPVGVVCGVTPTTNPTSTTIFKSMIALKTRNPIVFAFHPSAQKSSAEAARVVRDAAIAAGAPENCIQWIEHPSIEATSMLMNHPGIAIVLATGGAGMVKSAYSTGKPALGVGPGNVPAYIEKTAKIKRAVNDLIVSKTFDNGMICASEQAVIVDKEIYAAVKAEFQAHQVYIVKPDELQKLEDAVMNEGKYAVNPSIVGHSAMEIAKLAGISVPKGTKMLIAELEGVGPDYPLSREKLSPVLAMIKANNTDHAFDLCEGMLNLGGLGHTAVIHSENEELHVKFGLRMKACRILVNTPSAEGGIGDIYNEMIPSLTLGCGSYGKNSVSRNVSAVNLINVKTVAKRRNNMQWFKLPPKIFFEKNSLLYLEKMENVERVMIVCDPGMVQFGYCDTVREVLSRRKNDVKIEVFSEVEPNPSTNTVYAGTKLMADFKPDTVIALGGGSAMDAAKGMWMFYEHPDTSFFGAKQKFLDIRKRTYKIDKPEKTQFVCIPTTSGTGSEVTPFAVITDSETHVKYPLADYALTPDVAIVDPQFVMSVPASVTADTGMDVLTHAIESYVSVMASDYTRGLSLQAIKLVFDYLEKSVKTPDMESREKMHNASTMAGMAFANAFLGICHSVAHKIGGEYGIPHGRTNAILLPHIIRYNAKDPQKHAMFPKYDYFRADTDYADIAKFLGLKGETTEELVEALATAVYELGNSVGINMSLKAQGVTQETLDTTVDRMAELAYEDQCTTANPKEPLISELKQIIIDAYNG

SEQ ID NO: 107 - DNA, 1269 bp, Piromyces sp.
atggctaaggaatacttcccacaaatccaaaagatcaagttcgaaggtaaggactctaaacccattggctttccactactacgacgctgaaaaggaagttatgggtaagaagatgagactggttgagattcgctatggcttggtggcacaccttgtgtgctgaaggtgctgaccttcggtggtggtaccaagtctttcccatggaacgaaggtaccgacgctatcgaaatcgaagcaaaaggttgacgctggtttcgaaatcatgcaaaagttgggtatcccatactactttccacgacgtcgacttggtttctgaaggtaactctatcgaagaatacgaatctaactaaggctgttgttgcttacttgaaggaaaagcaaaaggaaactggtatcaagttgttgttctaccgctaacgttttcggtcacaagagatacatgaacggtgcttctaccaacccagttcgacgttgttgctagagctatcgttcaaatcaagaacgctatcgacgctggtatcgttgggtgctgaaaactacgttttctggggtggtagagaaggttacatgtctttgttgaaccgaccaaaagagagaaaaggaacacatggctaccatgttgaccatggctagagactgctagatctaagggtttcaagggtaccttcttgatcgaaccaaagccaatggaaccaaaagcaccaatacgacgttgacaccgaaaccgctatcggtttcttgaaggctcacaactgacaaggacttcaaggtcaacatcgaagttaaccacgctaccttggctggtcacacctgaacacgaattggcttgtgctgttgacgctggtatgttgggttctatcgacgctaacaggtgactaccaaaacggttgggacaccgaccaattcccaatcgaccaatacgaattggcaagcctggatggaaatcatcagaggtggtggtttcgttactggtggtaccaacttcggctaagaccagaagaaactctaccgacttggaagacatcatcatcgctcacgtttctgatggacgctatggctagagctttggaaaacgctgctaagttgttgcaagaatctccataccaagatgaagaaggaaagatacgcttctttcgactctggtatcggtaaggacttcggacggtaagttgaccttggaacaagtttacgaatacggtaagaagaacggtgaaccaacaaacctctggtaagcaagaattgtacgaagctatcgttgctatgtaccaa

SEQ ID NO: 108 - protein, 437 aa, Piromyces sp.
MAKEYFPQIQKIKFEGKDSKNPLAFHYYDAEKEVMGKKMKDWLRFAMAWWHTLCAEGADQFGGGTKSFPWNEGTDAIEIAKQKVDAGFEIMQKLGIPYYCFHDVDLVSEGNSIEEYESNLKAVVAYLKEKQKETGIKLLWSTANVFGHKRYMNGASTNPDFDVVARAIVQIKNAIDAGIELGAENYVFWGGREGYMSLLNTDQKREKEHMATMLTMARDYARSKGFKGTFLIEPKPMEPTKHQYDVDTETAIGFLKAHNLDKDFKVNIEVNHATLAGHTFEHELACAVDAGMLGSIDANRGDYQNGWDTDQFPIDQYELVQAWMEIIRGGGFVTGGTNFDAKTRRNSTDLEDIIIAHVSGMDAMARALENAAKLLQESPYTKMKKERYASFDSGIGKDFEDGKLTLEQVYEYGKKNGEPKQTSGKQELYEAIVAMYQ

SEQ ID NO: 109 - DNA, 1272 bp, Bacteroides thetaiotaomicron
atggctaccaaagagtttttcccaggtattgaaaagattaagttcgaaggtaaagattaagaacccaatggctttcagatactacgacgctgaaaaggttattaacggtaaaaagaaaggactggttgagattcgccatggcttggtggcacactttgtgtgctgaaggtggtgcaattcggtggtggtaccaagcaatttccatggaacggtaacgctgacgctattcaaggctaaggacaagatggatgctggtttcgagttcatgcaaaagatgggtatcgaatacttgtttccacgacgtcgacttggtttccgaaggtgcttctgttgaagaatacgaagccattgaaggaaattgttgcttacgccaagcaaaagcaagctgagaccggtattaagttgttggggtactgctaacgttttcggtcacgctagatacatgaacggtgctgctactaaccgacttcgacgttgttgccagagctgctgttcaaattaagaacgctattgacgctactagaattgggtggtgaaaactacgttttctggggtggtagagaaggttacatgtctttgtaacaccgaccaaaagagagaaaaggaacacttggctcaaatgttgactattgctagagtacgccagagctagaggtttcaagggtactttcttgattgaacctaagccaatggaacactaagcaccaatacgacgttgacactgaaactgttattggtttcttgaaggctcacgttggacaaggacttcaaggttaacattgaagttaaccacgctactttggctggtcacattcgaacacgaattggctgttgctgttgacaacggtatgttgggttctatcgacgctaagaggtgactaccaaaacggttgggacactgatcaattcccaattgacaactacgaatactcaagctatgatgcaaattattagaaacggtggtttgggtaccggtggtactaactgatgctaagactagaagaaactctactgacttggaagacattttcattgctcacattgggtatggacgctatggctagagccttggaatctgctgctgctttgttggacgaatctctacaagaagatgttggctgacagatacgcttctttcgacggtggtaaaggtaaagaatgaagacggtaaattgactttagaagacgttgtcgcctacgccaagactaagggtgaacaagcaaacttctggtaaacaagaattgtacgaagctattctaaatatgtactgt

SEQ ID NO: 110 - protein, 438 aa, Bacteroides thetaiotaomicron
MATKEFFPGIEKIKFEGKDSKNPMAFRYYDAEKVINGKKMKDWLRFAMAWWHTLCAEGGDQFGGGTKQFPWNGNADAIQAAKDKMDAGFEFMQKMGIEYYCFHDVDLVSEGASVEEYEANLKEIVAYAKQKQAETGIKLLWGTANVFGHARYMNGAATNPDFDVVARAAVQIKNAIDATIELGGENYVFWGGREGYMSLLNTDQKREKEHLAQMLTIARDYARARGFKGTFLIEPKPMEPTKHQYDVDTETVIGFLKAHGLDKDFKVNIEVNHATLAGHTFEHELAVAVDNGMLGSIDANRGDYQNGWDTDQFPIDNYELTQAMMQIIRNGGLGTGGTNFDAKTRRNSTDLEDIFIAHIAGMDAMARALESAAALLDESPYKKMLADRYASFDGGKGKEFEDGKLTLEDVVAYAKTKGEPKQTSGKQELYEAILNMYC

SEQ ID NO: 111 - DNA, 1437 bp, Saccharomyces cerevisiae
atgactacggataacgctaaggcgcaactgacctcgtcttcagggggtaacattattggtgtccaacaggcttcccgtgacaatcactaaaaacagcagtacgggacagtacgagtgcaatgtcgtccggagggctggtcacggcgttggaagggttgaagaagacgtacacttaagtggttcggatggcctgggctagagattcctgacgatgagaaggatcaggtgaggagacttgctggaaaagtttaatgccgtacccatcttcctgagcgatgaaatcgcagactcactacaacgggttcagtaattctattctatggccgttattccattaccatcctggtgatcaatttcgacgagaatgcgtggttggcatacaacgaggcaaaccagacgttcaccagagattgctaagactatgaaccataacgatttaatctgggtgcatgattaccatttgattggttccggaaatgttgagagtcaagattcacgagaagcaactgcaaaacgttaagggggtggttcctgcacacaccattcccttcgagtgaaatttacagaatcttacctgtcacaagagattttgaagggtgttttgagttgtgatttagtcgggttccacacatacgattgcaagacatttcttgtcttccgtgcaaagagtgcttaacgtgaacacattgcctaatggtggaataccagggcagattcgttaacgtaggggccttccctatcggtatcgacgtggaagttcaccgatgggttgaaaaaggaatccgtacaaaagagaatccaacaattgaaggactttcaagggctgcaagatcatagttggtgtcgacaggctggattacatcaaaggtgcctcagaagttgcacgccatggaagtgtttctgaacgagcatccagaatggaggggcagttgttctggtacaggttgcagtgccaagtcgtggagatgtggaagagtaccaatattagatctgtggtcaatgagttggtcggtagaatcaacggtcagttcggtactgtggaatgtccccatccatttcatgcacaagtctataccatttgaagagctgatttcgttatatggtgagcgatgtctgtttggtctcgtccacccgtgatggtatgaacttggtttcctacgtatattgcttgccaagaagaaaagaaaggttccttaatcctgagtgagttcacaggtggcacaatccttgaatggtgctattattgtaaatccttggaacaccgatgatctttctggccatcaacgaggccttgactttgcccgatgtaaagaaagaagttaactgggaaaaactacaaatacatctctaaatacacttctgccttctggggtgaaaatttcgtccatgaattacagtacatcatcaagctcaacaagctcctctgccaccaaaaac

SEQ ID NO: 112 - protein, 495 aa, Saccharomyces cerevisiae
MTTDNAKAQLTSSSGGNIIVVSNRLPVTITKNSSTGQYEYAMSSGGLVTALEGLKKTYTFKWFGWPGLEIPDDEKDQVRKDLLEKFNAVPIFLSDEIADLHYNGFSNSILWPLFHYHPGEINFDENAWLAYNEANQTFTNEIAKTMNHNDLIWVHDYHLMLVPEMLRVKIHEKQLQNVKVGWFLHTPFPSSEIYRILPVRQEILKGVLSCDLVGFHTYDYARHFLSSVQRVLNVNTLPNGVEYQGRFVNVGAFPIGIDVDKFTDGLKKESVQKRIQQLKETFKGCKIIVGVDRLDYIKGVPQKLHAMEVFLNEHPEWRGKVVLVQVAVPSRGDVEEYQYLRSVVNELVGRINGQFGTVEFVPIHFMHKSIPFEELISLYAVSDVCLVSSTRDGMNLVSYEYIACQEEKKGSLILSEFTGAAQSLNGAIIVNPWNTDDLSDAINEALTLPDVKKEVNWEKLYKYISKYTSAFWGENFVHELYSTSSSSTSSSATKN

SEQ ID NO: 113 - DNA, 2600 bp, Saccharomyces cerevisiae
atgaccaccactgcccaagacaattctccaaagaagagacagcgtatcatcaattgtgacgcagctgccctacaaaatccaattgggagaaagcaacgatgactggaaaatatctgactacaggtaacagcgcattatattcctctctagaataccttcaatttgattctaccgtacgagcaacacgttgttggttggaccggcgaaataacaagaaccgaacgcaacctgtactagagaagcgaaagagaaaccacaggatctggacgatgacccactatatttaacaagagcagatcaatgggttgactactactctacaagatcatatgaaatctgataaagaggaagaccgatactactcaaacagctcccgttaccaataacgttcatcccgtttggctacagaaaaaaccagagtagatggagaaattacgcggaaaaagtaatttggccaaccttcctacatcttgaatccttcaaatgaaggtgagcaagaaaaaaactggtggtacgactacgaagtttaacgaagcttatgcacaaaaaatcggggaagtttacaggaagggtgacatcatggatccatgactactacctactgctattgcctcaactactgagaatgaaatttaacggaatctatcattattggttatttccatcatgccccatggcctagtaatgaatattttctgtttgccacgtagaaaacaaatcttagatggtcttgttggggccaatagaatttgttcaaaatgaatctttctcccgtcattttgtatcgagttgtaaaagattactcgacgcaagccaagaaatctaaaaactcttccgatagtgatcaatatcaagtgtctgtgtacggtggacgtactcgtagattctttgcctataggtgttaacacaactcaaatactgaaagatgttcacgaaggatatagattccaaggttctttccatcaagcaagcttatcaaaacaaaaattattattggtagagatcgtctggattccgtcagaggcgtcgttcaaaaattaagagtttgaaactttcttggccatgtatccagaatggcgagatcaagtggtattgatccaggagcagtcctactgctaacagaaattccccccaaactatcagattggaacaacaagtcagagttggttaattccataaattctgaatatggtaatttgaatttttctcccgtccagctattatatgagaatccctaaagatgtatacttgtccttactaagagttgcagacttatttaatcacaagtgttagagacggtatgaataccactgctttggaatacgtcactgtgatctcacatgtcgaactttttatgctacggaaatccattgattttaagtgagttttctgtctagtaacgtattgaaagatgccattgtcgttaacccatgggattcggtggccgtggaaatctattaacatggctttgaaattggacaaggaagaaaagtccaatttagaatcaattatggaaagaagttcctacaattcaagattggactaataagtttttgagttcattaagaacaggcgtcatctgatgatgatgtggaaaggaaaatgactccagcacttaatagacgttcttttagaaaactacaagcaggctaagcgtagattattcctttttgattacgatgactttgaccccaattgtcaaagacccagctgcagctattccatcggcaagactttataattctacaaaaattatgtgccgatcctcataatcaaatctggattatttctggtcgtgcagaagtttttgaacaagtggttaggcggtaaacttcctcaactgggtctaagtgcggcatggatgtttcatgaaagatgtttcttgccaagattgggtcaatttgaccgaaaaaggatatgtcttggcaagtacgcgtcaatgaagtgatggaagaatttaccacaaggacccggttcattcatcgaaagaaagaaagtcgctctaacttggcattatagacgtaccgttcgaattgggtgaattccacgccaaagaactgaaagaaaaattgttatcatttactgatgttcgatttagaggtcatggatggtaaagcaaacattgaagttcgtccaagattcgtcaaaaggtgaaatagtcaagagactagtctggcatcaacatggcaaaccacaggacatgtaagggaatcagtgaaaaactacctaaggatgaaatgcctgattttgtattatgtctgggatgacttcactgacgaagacatgtttagacagttgaataccattgaaacttgttggagaaaaatatcctgaccaaaaaaatcaatggggcaactacggattctatcctgtcactgggatctgcatccaagaaaactgtcgcaaaggctcatttaaccgatcctcagcaagtccgagactttaggtttacttgttggtgatgtctctctcttccaaagtgctggtacggtcgctggattccagaggtcatgtcaagaatagtgagagcagtttgaaatcaaagctagcataaagcttatgttatgaaaagatcggcttcttacaccggcgcaaaggtt

SEQ ID NO: 114 - protein, 896 aa, Saccharomyces cerevisiae
MTTTAQDNSPKKRQRIINCVTQLPYKIQLGESNDDWKISATTGNSALYSSLEYLQFDSTEYEQHVVGWTGEITRTERNLFTREAKEKPQDLDDDPLYLTKEQINGLTTTLQDHMKSDKEAKTDTTQTAPVTNNVHPVWLLRKNQSRWRNYAEKVIWPTFHYILNPSNEGEQEKNWWYDYVKFNEAYAQKIGEVYRKGDIIWIHDYYLLLLPQLLRMKFNDESIIIGYFHHAPWPSNEYFRCLPRRKQILDGLVGANRICFQNESFSRHFVSSCKRLLDATAKKSKNSSDSDQYQVSVYGGDVLVDSLPIGVNTTQILKDAFTKDIDSKVLSIKQAYQNKKIIIGRDRLDSVRGVVQKLRAFETFLAMYPEWRDQVVLIQVSSPTANRNSPQTIRLEQQVNELVNSINSEYGNLNFSPVQHYYMRIPKDVYLSLLRVADLCLITSVRDGMNTTALEYVTVKSHMSNFLCYGNPLILSEFSGSSNVLKDAIVVNPWDSVAVAKSINMALKLDKEEKSNLESKLWKEVPTIQDWTNKFLSSLKEQASSDDDVERKMTPALNRPVLLENYKQAKRRLFLFDYDGTLTPIVKDPAAAIPSARLYTILQKLCADPHNQIWIISGRDQKFLNKWLGGKLPQLGLSAEHGCFMKDVSCQDWVNLTEKVDMSWQVRVNEVMEEFTTRTPGSFIERKKVALTWHYRRTVPELGEFHAKELKEKLLSFTDDFDLEVMDGKANIEVRPRFVNKGEIVKRLVWHQHGKPQDMLKGISEKLPKDEMPDFVLCLGDDFTDEDMFRQLNTIETCWKEKYPDQKNQWGNYGFYPVTVGSASKKTVAKAHLTDPQQVLETLGLLVGDVSLFQSAGTVDLDSRGHVKNSESSLKSKLASKAYVMKRSASYTGAKV

SEQ ID NO: 115 - DNA, 3186 bp, Saccharomyces cerevisiae
atggctctcatcgtggcatctttgtttttgccctaccaaccacaattcgagcttgacatctctccctgagaactcgcaggtggactcatctctcgtgaacatccaggctatggccagaccaacagcaacaacgtgcgctttctaacaacatctcacaggaatcattggtcgcgcgcaccagaacaaggtgtcccaccagcaatctcaaggagtgccaccaggtcacccagtgttcaaccgcgcctcgtctacgacaaatactgccactttagatgatcttgtctcttcggatattcatggaaaacttgactgcgaatgcaactacctcacatacgccaacaagcaagaatacttaaaccccggaaaaatggttccgtggaacgattcttctccccttcttccaatacccacggatcgcatcgcatcgccaatccagcatgagcatgactccggttcgagaattgtcgccaatccaacagcaacagcaggaccccacggccaacttattaaagaacgtcaacatcattgttagtgcactcactgttgaacaacacctcacaaactagcctagaaggacccaaaccacattgttaccccgaaatcgagggcgggcaacaggcctacttcggcggctacttttagttaataggaccaaacaaggttcggcctcctctggatcttctgggtcttctgcgcccttccattaaaaggattacgccccacttgactgcgtccgctgcaaaacagcgcccctttggctaaacagccttctaatctgaaatattcggagttagcagatatttcgtcgagtgacgtcttcgcagcataatgagtcggacccggatgatctaactactgcccctgacgaggtatgtttctgatttggaaatggatgacgcgaagcaggactacaaggttccaaagttcgggctattccaataaatctaaacttaagaagtatgcgctgttaaggtcatctcaggagctttagccgtcttccatggtcgatcgttccctctatcaaaggtaatggcgccatgaagagccataaacactgcagtcttggagaatatcattccgcaccgtcatgttaagtgggtcgaccgtcggaatcccaacggatgagattccggaaaatatccttgcgaacatctctgactttaaaagacaagtacgactcctatcctgtccttacggacgacgtcaccttcaaagccgtacaaaaactactgtaaacaaatcttgtggcctacgctgcattaccagattccagacaccgaactcgaaggcttttgaagatcactcttggaagttctatagaaacttaaaccaaatttgcggacgcgatcgttaaaatccataagaaaggtgacaccatctggattcatgattcatttaatgctggttccgcagatggtgagagacgtcttgccttttgccaaaataggataccttacatgtctcgttccccagtagtgaagtgtttaggtgtctggctcagcgtgagaatcttagaaggcttgaccggtgcagactttgtcggcttccagacgagggagtatgcaacatttcttacagacgtctaaccgtctgctaatggcggacgtggtacatgatgaagagcaagtataacggcagagtcgtttctgtgaggttcaccccagttggtatagacgcctttgttgcaatcgcaattgaaggatggaagtgtcatgcaatggcgtcaattgattcgtgaaatggcaagggaaaaaactgattgtgtgtcgtgatcaattcgatagaattaggggtattcaagaaattgttggcttatgaaaaatttttggtcgaaaatccagaatacgtggaaaaatactttaattcaaatctgtattggaagcagtaaggatgtagaactagaacgccagatcaattgttgtggatagaatcaactcgctatccaccaatattagtatttctcaacctgtggtttttacatcaagatctagatttttctcagtatttagctttgagttcagaggcagattttcgtagtcagctctctaagggaaggtatgaacttgacatgtcacgaatttatcgttttctgaggacaaaaatgctcccctactgttgtcagaatttactggtagtgcatctttataatgatggcgctataataattaacccatgggataccaagaacttctcacaagccattcaaggggttggagatgccattcgataagagaagaccacagtggaagaaattgatgaaagattatcaacaacgactctacaaactggatcaaaacttctttacaagatattcatattttggcaattcaatcaagaaggttccaagatcttcaaattgaatacaaaaacactgatgggattaccagtcatctaaaaagcgtatgtttgttttcaacattgctgaaccaccttcatagaatgatttccatactgaatgacatgacttctaagggcaatatcgtttacataatgatcatttccaaagcccattctggaaaatctttacagtcgggtgcaaaacattgggttgagccgaaaatggtgcatacgttagtctgaacggtgtatggtacaacattgttgatcaaggattggcgtaacgatgtagccaaaattctcgaggacaaagtggaaagattacctggcttactacaagataaatgagtccatgatcaagttccacactgaaaatgcggaagatcaagcgtgtagctagtgttatcggtgatgccatcacacatatcaatactgtttttgaccacaggtattcatgcctacgtttacaaaaacgttgtttccgtacaacaagtgggactttccttcggcagctcaatttcttttcagattctataattctgcttcagatccactggatacgatccggccaaatcacaaatattcagacaccatctcaacaaaatccttcagatcaagaaccaacctccagcctctcccactgtgtcgatgaaccatattgatttcgcatgtgtctctgtcatcgtctcctgtgcttgaaccattgttcaaattggtcaatgatgaagcaagtgaagcaagtaaaagccggacacgccattgtttatggtgatgctacttctacttatgccaaagcatgtaaatgggttaaacgaacttttcacgatcatttcaagaatcattgaagat

SEQ ID NO: 116 - protein, 1082 aa, Saccharomyces cerevisiae
MALIVASLFLPYQPQFELDTSLPENSQVDSSLVNIQAMANDQQQQRALSNNISQESLVAPAPEQGVPPAISRSATRSPSAFNRASSTTNTATLDDLVSSDIFMENLTANATTSHTPTSKTILKPRKNGSVERFFSPSSNIPTDRIASPIQHEHDSGSRIASPIQQQQQDPTANLLKNVNKSLLVHSLLNNTSQTSLEGPNNHIVTPKSRAGNRPTSAATSLVNRTKQGSASSGSSGSSAPPSIKRITPHLTASAAKQRPLLAKQPSNLKYSELADISSSETSSQHNESDPDDLTTAPDEEYVSDLEMDDAKQDYKVPKFGGYSNKSKLKKYALLRSSQELFSRLPWSIVPSIKGNGAMKNAINTAVLENIIPHRHVKWVGTVGIPTDEIPENILANISDSLKDKYDSYPVLTDDVTFKAAYKNYCKQILWPTLHYQIPDNPNSKAFEDHSWKFYRNLNQRFADAIVKIHKKGDTIWIHDYHLMLVPQMVRDVLPFAKIGFTLHVSFPSSEVFRCLAQREKILEGLTGADFVGFQTREYARHFLQTSNRLLMADVVHDEELKYNGRVVSVRFTPVGIDAFDLQSQLKDGSVMQWRQLIRERWQGKKLIVCRDQFDRIRGIHKKLLAYEKFLVENPEYVEKSTLIQICIGSSKDVELERQIMIVVDRINSLSTNISISQPVVFLHQDLDFSQYLALSSEADLFVVSSLREGMNLTCHEFIVCSEDKNAPLLLSEFTGSASLLNDGAIIINPWDTKNFSQAILKGLEMPFDKRRPQWKKLMKDIINNDSTNWIKTSLQDIHISWQFNQEGSKIFKLNTKTLMEDYQSSKKRMFVFNIAEPPSSRMISILNDMTSKGNIVYIMNSFPKPILENLYSRVQNIGLIAENGAYVSLNGVWYNIVDQVDWRNDVAKILEDKVERLPGSYYKINESMIKFHTENAEDQDRVASVIGDAITHINTVFDHRGIHAYVYKNVVSVQQVGLSLSAAQFLFRFYNSTPSQQNPSDQEQQPPASPTVSMNHIDFACVSGSSSPVLEPLFKLVNDEASEGQVKAGHAIVYGDATSTYAKEHVNGLNELFTIISRIIED

SEQ ID NO: 117 - DNA, 2179 bp, Saccharomyces cerevisiae
atgagtcaagttaatacaagccaaggacgggtaggccaaggccgtcaaagaagattattcactaagtgaattcaatgatccattttcgaacgcagaagtctactatggccccccaagacccaagaaagcagaagcaggcaaagcccgctaagatcaaccgtacgaggactatgagttttcgataatgtatctcctttcaagaaaactggttttggtaaacttcaacagactacgtggttctgaggatgacacctattcaagtagtcaaggtaatcgtcgtttctttatcggatgtcgataaaacacttaatgaactactggctgctgaggataccgataaaaattatcatcaccatcgaggataccggtccaaaagttttgaaagtcggtaccgcaaactcctatgtataagcatattaatattaggggtacgtatatgttatccaatttgttgcaggaactaaattgcgaaaagttttggtagacaccaaattttcttagatgaagctcgtataaacgaaacccgtcaacagattatcaagattgataaacacacagttctggaactctttgaccaggagttgatctgaacaacgtaggcgaaattgcaaaagataccaagattgatacgccgggggaaaaatccaagaatctatgttccttatgattgtccagaacaatacgaattttatgttcgcttctcaaatgcatccatctttgaaattagaagttgaatatttaccaaaaaaaataagcagaatacgtcaaatccgtcaatgatacccccggtttactagcattggctatggaagcacttcaatccttctactggtgaaaaaactctcattggttacccttatgctgttcctgggtagattcaatgaattatatggttgggactcctatatgatggcactaggtctcctaggccaacaagactgatgttgcaagaggtatggtggagcattttatttttgagattaatctatggaaaaatattaaatgctaacagaagctactatctatgtagatcacagcccccatttgactgaaatggccttgatagtattcaaaaaacttggtggtaggagtaatcccgatggtggatttgttgaaaagagctttccaagcaagcataaaagagtacaaaactgtttggagcatctccaaggtttgatcccgaaacaggcttatccaggtaccatcctaacggtctcgattcctccggaaactgaaagtgatcacttcgataccgttttactaccatatgcatcgacacggcgttaccttagacgaatttaagcaactttataacgatggtaagataaaggagcaaattggatgagttttttcttcatgaccgtggcgttagagaatctggacacgacactatataggtttgagggcgtatgtgcctacctggccactattgacctgaattctcttctttaaatacgagattgatattgcagacttcataaaggaattctgcgacgacaaatatgaagcctttagaccattctataacaacttcagctatgtggaaagaaatggccaaaatcagacgaaaagattaccaaatatatgtgggatgacgagtcggggtttttctttgactacaacaaaaatcaagcacagaacgtcatacgaatccgcaactacattctgggcattatgggctgcttgccacgaaggagcaagcacagaaaatggtggagaaagcactacccaagttagagacttggaggtttagctgcatgtacggagcgttctcgaggcccaatttctatttcgagacattagacaatgggactatccatttggttgggcaccccatcaaattcttgcttgggaagctccgttcttatggttatttaactgtaacgaataggctagcttatagatggcttttcaatgacaaaggcttttgtcgattataatggtattgtggttgaaaaatatgatgtcacaaggaacagatcctcatcgtgttgaagcagaatacggtaatcaaggtgctgactttaaaggcagctactgaaggttttggatgggtcaatgccagttacattcttggtttgaagtataaacagtcacgcaagaagagcgcttggtgcttgcattccaccaatatcattctttagcattaaggcctcaagaaagaaacctttatggacta

SEQ ID NO: 118 - protein, 751 aa, Saccharomyces cerevisiae
MSQVNTSQGRVGQGRQRRLSSLSEFNDPFSNAEVYYGPPTDPRKQKQAKPAKINRTRTMSVFDNVSPFKKTGFGKLQQTRRGSEDDTYSSSQGNRRFFIEDVDKTLNELLAAEDTDKNYQITIEDTGPKVLKVGTANSYGYKHINIRGTYMLSNLLQELTIAKSFGRHQIFLDEARINENPVNRLSRLINTQFWNSLTRRVDLNNVGEIAKDTKIDTPGAKNPRIYVPYDCPEQYEFYVQASQMHPSLKLEVEYLPKKITAEYVKSVNDTPGLLALAMEEHFNPSTGEKTLIGYPYAVPGGRFNELYGWDSYMMALGLLEANKTDVARGMVEHFIFEINHYGKILNANRSYYLCRSQPPFLTEMALIVFKKLGGRSNPDAVDLLKRAFQASIKEYKTVWTASPRFDPETGLSRYHPNGLGIPPETESDHFDTVLLPYASKHGVTLDEFKQLYNDGKIKEPKLDEFFLHDRGVRESGHDTTYRFEGVCAYLATIDLNSLLYKYEIDIADFIKEFCDDKYEDPLDHSITTSAMWKEMAKIRQEKITKYMWDDESGFFFDYNTKIKHRTSYESATTFWALWAGLATKEQAQKMVEKALPKLEMLGGLAACTERSRGPISISRPIRQWDYPFGWAPHQILAWEGLRSYGYLTVTNRLAYRWLFMMTKAFVDYNGIVVEKYDVTRGTDPHRVEAEYGNQGADFKGAATEGFGWVNASYILGLKYMNSHARRALGACIPPISFFSSLRPQERNLYGL

SEQ ID NO: 119 - DNA, 1614 bp, Bifidobacterium adolescentis
atgtccttcacctccgttaccattatttcacctgaagctgctaatggtagaaacgttggctttgggtgttactaagactttggctgctgctggtaaaactggtgtttttagaccaggtctgtagaaaggatactttcaccgatgttttgatcgaagcttctaatgctggtttgtagagaacaatctgttggtgtttgtccaaaaagagccagaaacgacaaagaaggttctagctgatatcgttgctgcttatactcaagctgttgaaactgctagaccagatgctatggatagttggtactgatagatccgctgttaatgatccagctatgttttctttcaacgctggttgctgctgacttgcaatctccagttttgttggctgtatgtaccattgaaagaactcgaacaagttaagtctaccgttgaagcctctaccaaggttattgaagatgctggttctagttgtcggtgttttcattactggttgtgatgatactcaacctaacccattgaaggctttttgttgattatccagttccagtttggactttgccagctgttgattttaatgatgatggctatttccaaggctgatgaagcttttgctactaatgttgatgctgttgaattgaccggcattggaatctccatttgatgctccaactactccatacgcttttcaatatggtttgtggtaaagctaaggccgataagaaaactatcgttttgcctgaaggtaacgaagatagaaatcaaggctgccgattacttgttggaaagagatattgtcgatttgatcatcgtcggtggaaaatgctattttggctagaggtcaagaattgggtttgaagtctttaggtaaggctattccaagctaaggatgacgaaactgttttggaacctatggttgctaagttgtgtgaatagagctaaaaagggtatgaccgaagaacaagctagaaaacaattggccgatgattcttttcggtactatgttggttgttatgggtatggctgatggtttggtttctggttctgttatctactgctaacactgttagaccagccttgcaagttattaagacaaaaccaggtacttttggtttccggtgcttttttgatgtgttttaaggatcatgctgctgtttttgctgattgctattaacttgaatccaaacgctgaacaattggctgaaattgctattcaatctgctgactgctaaggcttttggtttggaacctaaagttggtatgttgtcctattctactttggtctggtaaaggtccagatgttgatttggttgaagaagctactactatcgttaaggatagctccagatttggctgttgttggttctattcaatttgatgctgcttggtcaccaactggctgctacaaaagctaaaggtgatccagttgctggtcatgttaatgtttttgttttccgatttgtgcgctggtaacattgcttacaaagctgttcaaagatcttctggtgctgctggttggtccagttttacaaggtttgaatagaccagttaacgatttgtctagaggtgctagttcaagatatcattaacaccattgctttgaccgctattgaagcccaa

SEQ ID NO: 120 - protein, 556 aa, Bifidobacterium adolescentis
MSFTSVTIISPEAANGRNVVALGVTKTLAAAGKTGVFRPAVCRKDTFTDVLIEASNAGLSREQSVGVCPKRARNDKEGSRADIVAAYTQAVETARPDAMVIVGTDRSAVNDPAMFSFNADVAADLQSPVLLAVCTIERTPEQVKSTVEASTKVIEDAGSKVVGVFITGCDDTQPNPLKACFVDYPVPVWTLPAVDFNDDDAISKADEAFATNVDAVELTVALESPFDAPTTPYAFQYGLLGKAKADKKTIVLPEGNEDRIIKAADYLLERDIVDLIIVGDENAILARGQELGLKSLGKAKFQAKDDETVLEPMVAKLCELRAKKGMTEEQARKQLADDSYFGTMLVVMGMADGLVSGSVNSTANTVRPALQVIKTKPGTSLVSGAFLMCFKDHAAVFADCAINLNPNAEQLAEIAIQSAETAKAFGLEPKVGMLSYSTLGSGKGPDVDLVEEATTIVKDKAPDLAVVGSIQFDAAWSPTVAATKAKGDPVAGHVNVFVFPDLCAGNIAYKAVQRSSGAAAVGPVLQGLNRPVNDLSRGATVQDIINTIALTAIEAQ

SEQ ID NO: 121 - DNA, 949 bp, Leuconostoc mesenteroides
atggaactttttgagcaattaaaaaataaaattaccggtcaaaataagacaattgtatccggaaggtgaagatccccgtatccagggcgcagctatcagattagcagctgataattatcgagccaatattgttgggggatgcacaggaaatttcaaaaactgcccaagcccatatttgatttatcgaacatagagacgattgatcctgcttcatatgatgagaatgaattggaaattaaatgcgacacttgtcgaaaggcgcaaagggaaaacagacgctgagacagctgaaatggctacaaaatgttaactattttgggacaatgctggtttatactggcaaagctgggtatggtgtcaggcgcagtacatccaactggtgatacagttcgtcctgcgttgcagaattaaaacggcgcctggctcatcacgtatttctggtgcattcattatgcaaaaaggcggagcgttatgtatttgcggacgctgccattaacattgacattgattcggacacgatgggaaattgcaatacaatcagcccacacagctcaagtgtttgatattgaaccaaaagttgatgctttcattttcaactaagggctccgcgaaatcacccttggtcgataaggtggcaagccactgcattggctaagaagttagcacctgaactggcggactcaattgatggagagtcagtttgatgctgcgtttgttgaatctgttgctgccgcaaaggcgcctgattcaaaaggcaggtaaagcgaacacatttattttcccaagtctagaagcaggtaatattggctataattgcacaacgcttgggtgggtttgaagcgattggacctattttacaaggcttagcaacctgtttctgatttatcgcgaggagccaatgaagaggatgtttataaagtagctattaactgctgcgcaagcattataa

SEQ ID NO: 122 - protein, 326 aa, Leuconostoc mesenteroides
MELFEQLKNKITGQNKTIVFPEGEDPRIQGAAIRLAADNLIEPILLGDAQEISKTAQAHNFDLSNIETIDPASYDENELAKLNATLVERRKGKTDAETAAKWLQNVNYFGTMLVYTGKADGMVSGAVHPTGDTVRPALQIIKTAPGSSRISGAFIMQKGEERYVFADAAINIDIDSDTMAEIAIQSAHTAQVFDIEPKVAMLSFSTKGSAKSPLVDKVATATALAKKLAPELADSIDGELQFDAAFVESVAAAKAPDSKVAGKANTFIFPSLEAGNIGYKIAQRLGGFEAIGPILQGLAKPVSDLSRGANEEDVYKVAIITAAQAL

SEQ ID NO: 123 - DNA, 958 bp, Oenococcus oeni
atgacaaatttatttactgagttggctgataaaattaaggaaaaaaaactgagactcgtttccggaaggcgatgattcaagagtccagggggcggccatccgtttaaaaaaagatgttactaacgccgatattattgggagatcaggcagcggtcgaaaagacagctgcagatacatttcgacctgagtggcatcaagcttatcgatccgcttaaattcgatgagaagcagtaatcaattgatcgataaactggttacccgacgaaaagggaaaactgacccgcaaacgggctatgtggctgcaggaagtaaattatttcggtaccatgcttgtttataccggcaagggacgcaatggtttccggtgctgttcatccaaccggcgatacggttcgtcccgctttgcattatcaagacagctcctggtgtcagtcgtatttccggtgcttttattatgcaaaaaagatgaacgctatctgtttgccgattcggcaattaatatcgaacttgatgcacaaaccagctgagattgccgttcaatcagcccatacggctaaaatatttggaatcgatccaaaaggccatgctgagtttttcaaccaaaggatcggcaaaacatgcattggtcgataaagttgcaggcaactaagctggcgcaggagatggcaccggatttagctgataatattgatggtgttacaattcgatgcagcttttgtcgaatcggttgccaaattaaaagctccgggatcaagtggccggtcatgcgaacgttttcatttttccaagtttggaagccggaaatattggttaaaattgcccaacgcttgggtggatacgaagcaattggtcctattttgcaaggattgggcacctgtttccgatctgtcgcgtggagcaagtcaagaagacgtatataaagttgcaaattactgctgctcaggctttaaaaaattag

SEQ ID NO: 124 - protein, 329 aa, Oenococcus oeni
MTNLFTELADKIKEKKLRLVFPEGDDSRVQGAAIRLKKDGLLTPILLGDQAAVEKTAADNHFDLSGIKLIDPLKFDEKQFNQLIDKLVTRRKGKTDPQTVAMWLQEVNYFGTMLVYTGKADAMVSGAVHPTGDTVRPALQIIKTAPGVSRISGAFIMQKNDERYLFADSAINIELDAQTMAEIAVQSAHTAKIFGIDPKVAMLSFSTKGSAKHALVDKVAQATKLAQEMAPDLADNIDGELQFDAAFVESVAKLKAPGSKVAGHANVFIFPSLEAGNIGYKIAQRLGGYEAIGPILQGLAAPVSDLSRGASQEDVYKVAIITAAQALKN

SEQ ID NO: 125 - DNA, 1187 bp, Bifidobacterium adolescentis
atggctaagaccgttttggttatcaactctggttcctcctctatcaaatatcaattgggatttggaaaccggtgaaggtattgcttctggtttggttgaaaaaatcggtgaaccaggatggtcattacaagcacgaatacaacggtgaaaaacacgaattggaagaacctatccgatcacgaacaaggtttgaaaagagtcttgggtttcttcgatgaattcggtccaaaatgctgatgctggtatagttgctgttggtcatagagttgttcaaggtggttctatttttcaagccagctttggttaacgataagactattggtcaagttaaggatttggctgttttggccattgcataatggtcctgaagctaaaggtgctgaagttatgagatctttgttgccaggttccacaaatcttcgttttcgactcttccttctttttccaattgccaaaagcttcttacctacgctttgaacaaagaagttgcccaacaataccacattagaagatatggtgctcggtacttcccacgaattcatttcttcagttgttccatccgttattggtaaaccagctgggtttaaagcaaatcgtcttgcatattggtaatggtgcttcagcttctgctgaaatttggtaaacctgttgaaacctctatgggtttgactccattggaaggtttggttatgggtgagaactggtgatattgatccagctgttgttttccacttgattagaaacgctcacatgtgttgatgaattggataccttgttcaacaagagatctggtatgatgggtttaactggttggtgatttgagagaagttcacagattggttgaagaaggtaacgaagatgctaaattggttggatatctacgttcatagaatcgttggttacatcggtaactacactgctcaaatggggtgttgatgttattacttttactgctggtgttggtgaaaacgatgatgttgttagaaatggtttgcgataagttggctccttttggtgttaagttggacgaagaaaagaacgccaagatctaaagaacctagaattatctctaccccagattccgctgttaccatttgtgttaccaactaacgaagaattggccattgctagaaaatctgctgctattgcagaagaaggtagattcttacggtaacgttttctccaag

SEQ ID NO: 126 - protein, 409 aa, Bifidobacterium adolescentis
MAKTVLVINSGSSSIKYQLVDLETGEGIASGLVEKIGEPVDGHYKHEYNGEKHELEEPIHDHEQGLKRVLGFFDEFGPKLADAGIVAVGHRVVQGGSIFPKPALVNDKTIGQVKDLAVLAPLHNGPEAKGAEVMRSLLPDVPQIFVFDSSFFFQLPKASSTYALNKEVAQQYHIRRYGAHGTSHEFISSVVPSVIGKPAEGLKQIVLHIGNGASASAEISGKPVETSMGLTPLEGLVMGGRTGDIDPAVVFHLIRNAHMSVDELDTLFNKRSGMMGLTGFGDLREVHRLVEEGNEDAKLALDIYVHRIVGYIGNYTAQMGGVDVITFTAGVGENDDVVRKMVCDKLAPFGVKLDEEKNATRSKEPRIISTPDSAVTICVIPTNEELAIARKSAAIAEEGKDSYGNVFSK

SEQ ID NO: 127 - DNA, 1218 bp, Leuconostoc mesenteroides
atggctaaaacaatggctgttaacgcaggtagttcatcactaaagtttcaattattagatgcctgcagaacaagtaattgcacaaggtgttatcgaacgcattggtatggacgatgatagtaacgattaaatacggtgcagaaatcaatgcagagcgcttggttggccattcaggatgacgaacatattactttgtccaaagacggcaaaggtaagaagtacgaaaacgttagcaattaaaaaccaccaacaggccattaacttcatgttgcaaaagttaacagatctggattattaaggactttaatgaaattactggtgtcggacatcgtgttgttgctggtggtgtggtttaatcattccgtggtggtaacagatgaggtgctggctaaaattgatcgtcttggattatgcaccacttcataacccagccaatgctatgggaattcgtgctttccaaaagcctccctgatgcattgtcagtggcggtttttgatacttctttccatcaaacaatgcctggaaaactttctttatgccttgccatatgaatactacacgcgttatggcgcccgcaagtggtgctcatggtacatcgcaccgatatgttgcatcgcgtgcagccgagttgctcggtagatttaaaaagcttgaaattaatcacgctgcatttaggtgcaggtgcctcaattacggattaaggatggtaagtcattagatacttctatgggattttctcccttagctggtgttgatggcaacgcgttcaggggatgtcgatgcttcgcttgtttattatattcaagaacgcgggactatctaacgaagagatgttaaatatattgaacaaaaagtccggtttgcttggtatcgacaatttcaagtgatatgcgtgacttgttagatgtccaagacactaatgagcatggacatggcgattagaatatttattaatcgtgttgttaaatatgtgggacagtatgttggaaatgggagacgttgatgctatcgtatttacagcaggaattggtgaaaactcagtccgttcgtaaaatgattattgataaattaaactactttggtgtgaaattagatgaagaaaaataatgttcgcggcaaagaagttgaaatatctacgaatgactccaaggtaaaagcctttgatcccaaccaatgaagaactaatgattgctagagatgttgaatctttgaaagcat

SEQ ID NO: 128 - protein, 419 aa, Leuconostoc mesenteroides
MAKTMAVNAGSSSLKFQLLEMPAEQVIAQGVIERIGMDDAIVTIKYGAEINAERLVGHSEDDEHITLSKDGKGKKYENVTAIKNHQQAINFMLQKLTDLGIIKDFNEITGVGHRVVAGGEWFNHSVVVTDEVLAKIDRLADYAPLHNPANAMGIRAFQKLLPDALSVAVFDTSFHQTMPDENFLYALPYEYYTRYGARKYGAHGTSHRYVASRAAELLGKDLKSLKLITLHLGAGASITAIKDGKSLDTSMGFSPLAGVAMATRSGDVDASLVYYIQEREGLSNEEMLNILNKKSGLLGISTISSDMRDLLDVQDTNEHADMAIRIFINRVVKYVGQYVAEMGDVDAIVFTAGIGENSVPVRKMIIDKLNYFGVKLDEEKNNVRGKEVEISTNDSKVKALLIPTNEELMIARDVESLKA

SEQ ID NO: 129 - DNA, 1156 bp, Oenococcus oeni
atgacaaaaattttatcggtaaatgccggctcgtcttcattgaagttcaaattgcttaatgcccgaagagagtgttatcgccgaaggactgattgaaagaatcggtggcagcctggcaagacgataatgtcacgattaaattcaatggcgaaaaacataagagccgtcaggcttaaaaatcacgaggatgctatcaacttgatgctttctcaatttaaaaagtttggaatcggataattttaatgagatcaaaggaattggccaccgtgttgttgccgggggtgaatggtaataaatctgtattaattaacgatgaagtgctgaataaaattgaacgtttggctgcttgctccactccataatcctgcgaacgctatgggcatcagggctttttccaaaataatccgatgcaaccgaagttgccgtatttgatacagctttccatcaaacgatgccgaaagagatacttgtatgcggttccttatgagtactatacgaaatacggtgttcgtaggtatggagcacggaacttcccataaatacgtttccgaacaggctgctaaattaattgggaaaccccgaagaacttaaactgattactttgcatttaggagccggagcgtctgtaacggccattaaatggtcgatcatttgatacctcgatgggattttcgcctttggccggattggttatggactcgttcaggggatgttgacgtctcattgattgattacgttaaagcaaaagaagatatccgatcaggaaatgctaaatgttcttaaccaaaaatccggattactgggtgtgtcaaatttcaagtgatatgcgtgatttgttggatgtttatgatactaacgatcatgctaaatgctattgatatgtttgtcggtcgtgtagttgattatatcggtcaatattattttgaataagggagctgatgcgcttgttttcacggccggaattggagagaattcggttccaatcaaaaatgattatcgatcgtctggctttcttgggcattaaactcgatgaagatgcaaatgaagcatggagtcgaaacaaagattacaactgatgattccaaaatggctgcatatgtaaccaaccaatgaggaactcgaaattgctcgtgatgtacaaaatttgatgaagtaa

SEQ ID NO: 130 - protein, 397 aa, Oenococcus oeni
MTKILSVNAGSSSLKFKLLNMPEESVIAEGLIERIGGSLDQDDNVTIKFNGEKHKSRQAFKNHEDAINLMLSQFKKFGIVDNFNEIKGIGHRVVAGGEWFNKSVLINDEVLNKIERLAAYAPLHNPANAMGIRAFSKIIPDATEVAVFDTAFHQTMPKENYLYAVPYEYYTKYGVRRYGAHGTSHKYVSEQAAKLIGKPLEELKLITLHLGAGASVTAIKNGRSFDTSMGFSPLAGLVMATRSGDVDVSLIDYVKAKEDISDQEMLNVLNQKSGLLGVSTISSDMRDLLDVYDTNDHAKLAIDMFVGRVVDYIGQYYFELKGADALVFTAGIGENSVPIRKMIIDRLAFLGIKLDEDANDKHGVETKITTDDSKMAAYVIPTNEELEIARDVQNLMK

SEQ ID NO: 131 - DNA, 1495 bp, Saccharomycopsis fibuligera
atgatcagattgaccgttttcttgaccgctgtttttgctgctgttgcttcttgtgttcgttgaattggataagagaaacaccggtcatttccaagcttattctggttataccgttgagatctaacttcacccaatggattcatgaacaaccagctgtttcttggtactacttgtcaaaacatcgattacccagaaggtcaattcaaatctgctaaaccaggtgttgttgttgtctccatctacatctgaaccagattacttctaccaatggactagagataccgctattattcttgtccttgattgctgaagttgaagatcattctttctccaacactaccttggctagttgtcgaatattacatttccaacacctacaccttgcaaagagtttctaatccatccgaacttcgattctccaaatcatgatggtttgggtgaacctaagttcaacgttgatgatagcttatacagcttcttggggtagaccacaaaatgatggtccagctttgagagcttacgatttctagatacttgaacgctgttgctaagcacaacaacggtaaattattattggccgcaaaacggtattccttattcttctgcttccgatatctactggaagattattaagccagttgcaacatgtttctactcattggtctacctctggttttgatttgtgggaagaaaatcggtactcatttcttcaccgctttggttcaattgaaggctttgtcttacggtattccattctaagacctacaatgatccaggtttcacttcttggttggaaaaacaaaaggatgcctaactcctacattaactcttccggtttcgttaactctggtaaaaagcacatcgttgaatccacaattgtcatctagaggtggtttggattctgctacttatattgctgccttgatcacatgatatcggtgatgatgatacttacaccccattcaatgttgataactcctacgtttaactccttgtattacctattggtcgacaacaagaacagatacaagatcaacggtaactaaagctggtgctgctgttggtagatatcctgaagatgtttacaacggtgttggtacttgaaggtaatccatggcaattggctactgcttatgctggtcaaactttttacaccttggtacaattccttgaagaacaagaagaacttggtcatcgaaaagttgaactacgacttgtaactccttcattgctgatttgtccaagattgattcttcctacgcttctaaggattcttactttgacctacggttccgataactacaagaacgttatcaagtccttgttgcaattcggactcattcttgaaggttttgttggatcacatcgatgacaacggtcaattgactgaagatcaacagatacaccggttttcaagctggtgcagtttctttgacttggtcatctggttttgttgtctgctaatagagccagaaacaagttgatcgaattattg

SEQ ID NO: 132 - protein, 515 aa, Saccharomycopsis fibuligera
MIRLTVFLTAVFAAVASCVPVELDKRNTGHFQAYSGYTVARSNFTQWIHEQPAVSWYYLLQNIDYPEGQFKSAKPGVVVASPSTSEPDYFYQWTRDTAITFLSLIAEVEDHSFSNTTLAKVVEYYISNTYTLQRVSNPSGNFDSPNHDGLGEPKFNVDDTAYTASWGRPQNDGPALRAYAISRYLNAVAKHNNGKLLLAGQNGIPYSSASDIYWKIIKPDLQHVSTHWSTSGFDLWEENQGTHFFTALVQLKALSYGIPLSKTYNDPGFTSWLEKQKDALNSYINSSGFVNSGKKHIVESPQLSSRGGLDSATYIAALITHDIGDDDTYTPFNVDNSYVLNSLYYLLVDNKNRYKINGNYKAGAAVGRYPEDVYNGVGTSEGNPWQLATAYAGQTFYTLAYNSLKNKKNLVIEKLNYDLYNSFIADLSKIDSSYASKDSLTLTYGSDNYKNVIKSLLQFGDSFLKVLLDHIDDNGQLTEEINRYTGFQAGAVSLTWSSGSLLSANRARNKLIELL

SEQ ID NO: 133 - DNA, 1480 bp, Bacteroides thetaiotaomicron
atgaataacgtatttgatcagtatgaagtatggttcgtaacaggagcacagctcttgtggaggtgatgcagtaatcgcagtagacgcacactctaacgaaatggttaacggtctgagaatcgggcaaacttcctgttaaagtagtatacaaaggaacggccaactcttctaaaggtggaagctgtattcaaagcagccaacaacgatgacaaatgtgtaggcgtcatcacttatgcatactttctctcctgctaaaatgtggattcatggtctgcaacaattaaagaaacttgctgcacctgcatactcaattcaacaaggaaattccttgggatacaatggatatggtttatgaatctgaaccagtcagctcacggcgaccgcgagttcggacatatctgtacccatgcgcatccgtcgcaaagtagtggtaggctactggaaagaagaagaaacattgcataattgctgtctggatgcgtgtttgcgcaggttgggcagactctcaggatatgctgatcacgtttcggcgatcagatgaataatgtagccgtaaccgatggtgacaaggtagaagcagcaacgcatgggctatcatgtagattattgcccggcaagcgagctgatggaatatcacagatatcaaaaatgctgatgtagatgctttggtagctacttacttcaatgactacgatcgacgcttctctggaagacaaatcaaccgaagcttatcagaaagtatggaatgctgccagccgagcttgctctccgtgctatcctcaaagcgaaaggcgccaaaggattcactaccatttgacgatctgggtcagactgacggtagctatttcgatcagattccgggactggcttcaacgcctgatggcagaaggctacggattcggtgctgaaggtgactggaaatcggctgctttatcgtactgtatgggtaatgaatcaaggacttccgaaaggctgttcattcctcggactatacactgaactttgatggtgccaacagttctatcctacagtcacatatgttggatctgtccgcttatcgcagctaacaagcctcgtctggaagtacacttcctcggcatagatccgtaagagccagactgcccgtcttgtgttcacttcaaagacaggaacaggctgcagcaactgtagtggatatgggtaaccgtttccgtctgatcgtaaacgatgtagaatgtagaaccgaaaccacttccgaaattgccggttgcttccgcactctggattccgatgcctactcgaagtaggcgcaggcgcatggattctggccggtggaactcaccactcttgcttcttacgacttgacagcagaatactgggaagattatgcagaaatcgcaggcatcgaaatggcatatcaataaagatacgactatcagctgcttcaagaaagaactgcgcatgaatgaagtattatatgctgaacaaagcgctttgctaa

SEQ ID NO: 134 - protein, 509 aa, Bacteroides thetaiotaomicron
MNNVFDQYEVWFVTGAQLLYGGDAVIAVDAHSNEMVNGLNESGKLPVKVVYKGTANSSKEVEAVFKAANNDDKCVGVITWMHTFSPAKMWIHGLQQLKKPLLHLHTQFNKEIPWDTMDMDFMNLNQSAHGDREFGHICTRMRIRRKVVVGYWKEEETLHKIAVWMRVCAGWADSQDMLIIRFGDQMNNVAVTDGDKVEAEQRMGYHVDYCPASELMEYHKDIKNADVDALVATYFNDYDHDASLEDKSTEAYQKVWNAAKAELALRAILKAKGAKGFTTNFDDLGQTDGSYFDQIPGLASQRLMAEGYGFGAEGDWKSAALYRTVWVMNQGLPKGCSFLEDYTLNFDGANSSILQSHMLEICPLIAANKPRLEVHFLGIGIRKSQTARLVFTSKTGTGCTATVVDMGNRFRLIVNDVECIEPKPLPKLPVASALWIPMPNLEVGAGAWILAGGTHHSCFSYDLTAEYWEDYAEIAGIEMVHINKDTTISCFKKELRMNEVYYMLNKALC

SEQ ID NO: 135 - DNA, 1544 bp, Bacteroides thetaiotaomicron
atgaaattagatgcaaaatcaaccatcgagacaggtaaagctatccttggcatagaacggttctacacgaataaaagctgttctgattgaccaggaaaacaaacctatcgctcaagagccacacatgggaaaatcaactggtcaacggactttggacttacagcattgatgccatggtccggactgcaagattgctacgccgacctccgctccaacgtgaagaaattatacgacagagatcgaaacactggcagccatcggtgtcagcgccatgatgcatggttacatgcttcaatgaaaaagaagaaatcctcgtgcctttccgcacttggagaaataccaatacagcgtgctgcggcagaattatccgaattatttgtctataacatccctttgagatggagcatctcatttgtaccaggctattctggacaacgaagcgcacgtcaaagacatcaagttccacaactcttgcaggttatgtacattggcagataacaggcgaaaaggtgttgggcattggacgcatcgggtatgctccccatagatccgactaccaacaactattccgccgaaatgggccaaattcaacaatctgattgcttcgaaagaatacagttggaaactggaagacattccccaaagtattgtcggctggtgaaaatgccggtgtcctcacaccggaaggctgtaaaactcgatgcatccggtcatctgaaggcaggaataccggtctgcccaccggaaggagacgggcaccggcatggtagcaaccaacgccgtcaagcaacgcaccggcaacgtatcggcagacttcttctttctctatgatcgtattggaaaaagaattgtcgaagccatacgaaatgagacatggtcaccactcccgacggaagcctcgtagccatggtacattgcaacaactgtatcggatcttaacgcatgggtcaacctgttcaaagaataccaggaacttctgggtatacgtagatatggatgaactctatggcaaactttataacattgcccttaccggtgataccgtgcggtggtctcctctcctacaactacatttcaggcgaacctgttacgggacttgccgggaagacctttgttcgtacgttcggccaatgacaagttcaaccttgcaaactttatgcgctcatttgtacgcctcagtcggagttctcaagattggcaacgacatcttgttcaacggaaaagatcaaagtcgacagaatcacaggtcacggaggattgttcagaaccaaaggagggtcaaagagtacttgcagcagccatcaactcgcccatatctgttatggaaacagccggaaggcggtgcatggggaattgccctgctgggttcttacctggtaaacaataaaaaggcaatctcttgccgatttcctggatgaaagtgtatttgtcagcgatgctggtgtcgaggtcacccacacccgaagatgtagccggcttcaacacatacatcgaaagctacaaggcagttgcctatagaagaagcagccgtcaaattcaaataa

SEQ ID NO: 136 - protein, 531 aa, Bacteroides thetaiotaomicron
MKLDAKSTIETGKAILGIELGSTRIKAVLIDQENKPIAQGSHTWENQLVNGLWTYSIDAIWSGLQDCYADLRSNVKKLYDTEIETLAAIGVSAMMHGYMPFNEKEEILVPFRTWRNTNTGRAAAELSELFVYNIPLRWSISHLYQAILDNEAHVKDIKFLTTLAGYVHWQITGEKVLGIGDASGMLPIDPTTNNYSAEMVAKFNNLIASKEYSWKLEDILPKVLSAGENAGVLTPEGCKKLDASGHLKAGIPVCPPEGDAGTGMVATNAVKQRTGNVSAGTSSFSMIVLEKELSKPYEMIDMVTTPDGSLVAMVHCNNCTSDLNAWVNLFKEYQELLGIPVDMDELYGKLYNIALTGDTDCGGLLSYNYISGEPVTGLAEGRPLFVRSANDKFNLANFMRAHLYASVGVLKIGNDILFNEEKIKVDRITGHGGLFRTKGVGQRVLAAAINSPISVMETAGEGGAWGIALLGSYLVNNKKGQSLADFLDESVFVSDAGVEVSPTPEDVAGFNTYIESYKAGLPIEEAAVKFK

SEQ ID NO: 137 - DNA, 662 bp, Bacteroides thetaiotaomicron
atgctggaagaactgaaagaaaaagtatttcatgccaatctcgaattggtaaagcatgttagtcatctttacatggggaaatgtttctgccatcgaccgtgaaacggaactggtagatcaaacccagtggagtcagttatgatgatatgaaagcggaagatatggtagtagtggctggatggcaaagtcgtcgaaggacggctgaagccatcctcagatactcctactcacggtactctacaaagcattccccgaaatcggcggagtggtgcatacccactctacttatgaccgcatgggcgcaggccggttgtgatattcccaatatcgggacaactcacgctgactttccatgatgcaatcccctgcacagcggatatgacggaagctgaagtaaaaggtgcctgaactggaaaccggaaacgtgatcgtaaaacgtttcgaaggcctgaaccctgtacataccgggagtattggtcaagaatcatggtcctttctcttggggaaaagacgcacacgatggtacacaatgcagtagtgatggaacaagttgccaaaatggcaagcattgcttatgccgaatcccaatttaacaatgaacccgctgctggtagagaaacacttcagccgcaagcatgccgaacgcttactacggacaataa

SEQ ID NO: 138 - protein, 227 aa, Bacteroides thetaiotaomicron
MLEELKEKVFHANLELVKHGLVIFTWGNVSAIDRETELVVIKPSGVSYDDMKAEDMVVVDLDGKVVEGRLKPSSDTPTHVVLYKAFPEIGGVVHTHSTYATAWAQAGCDIPNIGTTHADYFHDAIPCTADMTEAEVKGAYELETGNVIVKRFEGLNPVHTPGVLVKNHGPFSWGKDAHDAVHNAVVMEQVAKMASIAYAVNPNLTMNPLLVEKHFSRKHGPNAYYGQ

SEQ ID NO: 139 - DNA, 1651 bp, Saccharomyces cerevisiae
atgaaggatttaaaattatcgaatttcaaaggcaaatttataagcagaaccagtcactggacttacgggtaagaagttgcggtatttcatcactatcgcatctatgacgggcttctctgtttggatacgaccaagggttgatggcaagtctaattactggtaaacagttcaactgaatttccagcaaccaaagaaaatggcgatcatgacagacacgcaactgtagtgcagggctacaacctcctgttatgaattaggttgtttcgcaggttctctattcgttatgttctggtgaaagaattggtagaaaaccattaatcctgatgggttccgtaataaccatcattggccgttatttctacatgcgcatttcgtggttactgggcattaggccagtttatcatcgagagtcgtcactggtgttggaacagggttgaatacatctactattcccgtttggcaatgaaatgtcaaaagctgaaaatagagggttgctggtcaatttagaaggttccacaattgtttggtactatgattgcttattggattgattttgggttgtcttataccaacagttctgcagtggagattccccgtgtcaatgcaaatcgtttttgctctcttcctgcttgctttcaattaaactacctgaatcgccacgttggctgatttctcaaagtcgaacagaagaagctctacttggtaggaacactagacgacgcggatccaaatgatgaggaagttataacagaaggctatgcttcacgatgctgttaacaggaccaaacacgagaaacattcactgtcaagttttctccagaggcaggtcccaaaatcttcagagggctttgattgcagcttcaacgcaatttccagcaatttactggttgtaacgctgccatatactactctactgtattattcaacaacaattaaattagactatagattatcaatgatcataggtggggtcttcgcaacaatctgccttatctactattggttcattttttctaattgaaaagctaggtagacgtaagctgtttattaggtgccacaggtcaagcagtttcattcacaattacatttgcatgcttggtcagaaaataaagaaaacgcaagaggtgctgccgtcggcttatttttgttcattacattctggtttgtctttgctatcattaccatggatatacccaccagaaattgcatcaatgaaagcgtgcatcaacaaacgctttctccacatgtactaattggttgtgtaactttgcggttgatgttcaccccaatatttattggacagtccggttggggttgctacttattttttgctgatgaattatttatacattccagttatcttctttttctaccctgaaaccgccggaagaattggaggaaatcgacatcatctttgctaaagcatacgaggatggcactcaaccatggagttgctaaccatttgcccaagttatccctacaagaagtcgaagatcatgccaatgcatggctcttatgacgacgaaatggaaaaagaggactttggtgaagatagagtagaagacatataaccaaattaacggcgataattcgtctagttcttcaaacatcaaaaatgaagatagtgaacgataaagcaaattttgagggt

SEQ ID NO: 140 - protein, 569 aa, Saccharomyces cerevisiae
MKDLKLSNFKGKFISRTSHWGLTGKKLRYFITIASMTGFSLFGYDQGLMASLITGKQFNYEFPATKENGDHDRHATVVQGATTSCYELGCFAGSLFVMFCGERIGRKPLILMGSVITIIGAVISTCAFRGYWALGQFIIGRVVTGVGTGLNTSTIPVWQSEMSKAENRGLLVNLEGSTIAFGTMIAYWIDFGLSYTNSSVQWRFPVSMQIVFALFLLAFMIKLPESPRWLISQSRTEEARYLVGTLDDADPNDEEVITEVAMLHDAVNRTKHEKHSLSSLFSRGRSQNLQRALIAASTQFFQQFTGCNAAIYYSTVLFNKTIKLDYRLSMIIGGVFATIYALSTIGSFFLIEKLGRRKLFLLGATGQAVSFTITFACLVKENKENARGAAVGLFLFITFFGLSLLSLPWIYPPEIASMKVRASTNAFSTCTNWLCNFAVVMFTPIFIGQSGWGCYLFFAVMNYLYIPVIFFFYPETAGRSLEEIDIIFAKAYEDGTQPWRVANHLPKLSLQEVEDHANALGSYDDEMEKEDFGEDRVEDTYNQINGDNSSSSSNIKNEDTVNDKANFEG

SEQ ID NO: 141 - DNA, 1587 bp, Candida albicans
atgggtgggttcatagataatattttcaaaagaaccacaactgctggattaactggtaaaattacgtgcagcagtcactattactgccacacttgggttttcacttttcggatatgcaaggtttaatggccggattaatttctgccgaacaattcaattgggaattccctgctaaaagataatagtgttatccaaggtgctgttactgcatcttatgaattgggatgtttctggtgctatttttgctttacttagaggtgatgctttaggtagaaaaccaattattttctggtgctactattattattcttggtacaattatttccgttactccatttagaccacattccattaggtcaatttgtggttggtagagtcatcactggtattggtaatggtatgaatagctactattccagtgtggcaatcagaaatgtcaaaaccagaaaatagaggtaaattggaatttagaaggtgccgttgtggcatttggtacttttattgcttattggttagattttgttatcttatgttgattcttcagtttcttggagattcccagttgctttccaaattttctgccttatgggttatttttggaattattcaattacctgaatctcctcgttggttgatttaaagatagaaaaccagaagcttttgaagtcttagctgctttaaatgatactactccaggatgatgctattgttgctgaagctagtgttattattgacgccgttagaagaaacgctagtccaagctggtttcaaagatttgtttactggtggtaaaactgctcatttccaaagaacttattgggtcatcaacccaatttttccaacaattcactggttgtaatgcagctattttattccactttattgttctacgaaaccgttttccatcatactaaataccgtttatcaaattttgggtggggtgtttgctactatttatgctttagccactcttccatcattcttttattgatactttgggtagaagaaatttgtttttaattggtgcaattggtcaagggatttttccttatttcatttgcttgtttgattaacccaactgaacaaaatgctaaaggtgctggttggtatttatttgtttattgttttctttgccttcaccattttaccattaccatggatacccaccagaaattaatccattaagaacaagaactactgcttctgccgtctccacttaccaattggttaaccaatttcgccgttgttatgtttactccaccatttatttctgctaggttggggttgttatctttattttgccgttatgaatttcttgtttgttccaatcatctttcttttatccagaaactgctggtagatcattagaagaaattgatattattttcgctagcttacgttgaaaaaagacaaccatggagagttgctgctactttaccaaaattatcatcaagaagttgaagatgaatctaaaagcttgggtctttatgatgatgatttcgaaaaagaatttcgaaactaaagaagatatttctgatggtactgcctcaaacagtaatggtgtttgaaaaaccagaaaatgtttaa

SEQ ID NO: 142 - protein, 546 aa, Candida albicans
MGGFIDNIFKRTTTAGLTGRKLRAAVTITATLGFSLFGYDQGLMAGLISAEQFNWEFPATKDNSVIQGAVTASYELGCFFGAIFALLRGDALGRKPIIFFGATIIILGTIISVTPFRPHWPLGQFVVGRVITGIGNGMNTATIPVWQSEMSKPENRGKLVNLEGAVVAFGTFIAYWLDFGLSYVDSSVSWRFPVAFQIFFALWVIFGIIQLPESPRWLISKDRKPEAFEVLAALNDTTPDDDAIVAEASVIIDAVRRNAKVQAGFKDLFTGGKTAHFQRMLIGSSTQFFQQFTGCNAAIYYSTLLFYETVFHHTKYRLSMILGGVFATIYALATLPSFFLIDTLGRRNLFLIGAIGQGISFLISFACLINPTEQNAKGAAVGIYLFIVFFAFTILPLPWIYPPEINPLRTRTTASAVSTCTNWLTNFAVVMFTPPFISASGWGCYLYFAVMNFLFVPIIFFFYPETAGRSLEEIDIIFAKAYVEKRQPWRVAATLPKLSLQEVEDESKSLGLYDDDFEKDNFETKEDISDGTASNSNGVFEKPENV

SEQ ID NO: 143 - DNA, 2341 bp, Aspergillus niger
atgcctggagaggtcatcgacaggccaaatcccaaggctgagccttcacacatccccgcttgtcaatcaattgcaggtcaaacttcaagagacgcgtttggaggaaactgattacagcccttctgaaattccgccgtgcagcggcctacattgctgctgcaatgatctttctccgacaatgtgctgctgaagcagaatctaaggcacgaggacatcaagcccaggcttcttgcactggggaacatgtcccgggttgattcttgtatactctcacttgaactacatcatcaaagcagaacctggatatgttgtatgtcgtcgggcctggccacggcgcgccagctatttgcctcactgtggcttgagggctctttagagaaattctacccccactactcacgagacagatggtctccatgagctcatctcgaccttcagcacaagtgctggattaccaagccataaatgcggaaactcccggtgcaatccatgaaggtggtgaattgggttatgcgttagctgtcttttggtgctgttatggacaatcccgacatgatcgtcacctgcgtggttggtgacggaagcagaaactggtcctaccgcgacgtcctggcatgcaatcaagtacattgaccccggaatcaggtgccgtcctgccgattctccacgttaatggctttaagatcagcgagcgcaatttatggctgcatggacaacaaagagctggtctccctcttcacgggttatggataccgtgcgcattgttgagaacctggatgacatcgacgcagatctccatagctctatgatgtgcagttgaggagatccacaagatccaaaaagcggcgcgttccggcaagccaattatgacctagatggccaatgattgttttgcgcacaccgaagggttggtcaggacctaaagagccacgggtcattcatagagggatctttccactcacatcaggttcctctacctaatgcaaaaggataaagaggagcttcaggctctgcagaaatggctgtcctcgtataatccgcacgcttttcactgagacgggagacatcattgacgacatcaagtcagtgatccctctggaagaccaagaagcttgggcagcgagcagaagcctacaagggctatagggcacccgatctccgactggcgcaagtttggcgtagaaaagggctcccagcagagcgctatgaaaacaattgaagttcattgaccaagtgtttacccaaaatcctcatggcgtccgtgtattttcgccaggagctagagagcaacaagctggatgcagcactggcgcacacgggaaggaactttcagtgatcaattctcgaatgccaaaggcggccgcgtcatcgaggtgctcagtgagcacctgtcagggctttatgcagggatacacgttgacgggccgggtgggcattttcccatcgtacgagcttcttgggaatcatccataccatgatggtgcaatatgccaaatttaacaaaatggcaagagacgacctggcataagccggttagtagcatcaactatatcgaaacgagtacgtgctcgtcaggagcacaatggattctctcaccagaacccctcctttatcggagctgtgcaggctgaagcccaccgccgcgcgagtttatctgccacctgatgctaacacatttttgaacccttcaccactgtctcaagtccaagaattatgtcaacctcatggtaggttcaaaacccaactcccgtgtacttgagccccgaggaagcagagagccactgccgagccggcgcatatctggagattctgtagtaccgacaatgggctgaacccggatgtcgtgctggttggcaggagtagaggtgatgttcgaggtcatctacgcggcggccatcctccgcaagcgttgtcgaactccgggtgcgtgtggtcaatgtgaccgacttgatgattctggagaaggaaggtccatccacatgcattgacgaccgaagctttcgacagtctgtttggctcggaccggccgacacttcaactaccacggatacccgggcgagctcaaaggtctgctctttgggcggccccctggaccgagtttcagtagaaggatacatggaggaaggaagcacgacgacgccgttcgatgatgttgctgaaccgcgtctcacgataccacgtggcgcaggcagccgtgatcggggtccagacggaatgagaaggttcaagttcggcagcacgaactggtcagcgaattcggccaacatcgtggagacacgcaaatacattctggccaaccgcaaagacccggatgatacgtgatatgccctcctttgaataa

SEQ ID NO: 144 - protein, 806 aa, Aspergillus niger
MPGEVIDRPNPKAEPSHIPDLVNQLQVKLQETRLEETDYNALLKFRRAAAYIAAAMIFLQDNVLLKQNLRHEDIKPRLLGHWGTCPGLILVYSHLNYIIRKQNLDMLYVVGPGHGAPAILASLWLEGSLEKFYPHYSRDMDGLHELISTFSTSAGLPSHINAETPGAIHEGGELGYALAVSFGAVMDNPDMIVTCVVGDGEAETGPTATSWHAIKYIDPAESGAVLPILHVNGFKISERTIYGCMDNKELVSLFTGYGYQVRIVENLDDIDADLHSSMMWAVEEIHKIQKAARSGKPIMKPRWPMIVLRTPKGWSGPKELHGSFIEGSFHSHQVPLPNAKKDKEELQALQKWLSSYNPHELFTETGDIIDDIKSVIPLEDTKKLGQRAEAYKGYRAPDLPDWRKFGVEKGSQQSAMKTIGKFIDQVFTQNPHGVRVFSPDELESNKLDAALAHTGRNFQWDQFSNAKGGRVIEVLSEHLCQGFMQGYTLTGRVGIFPSYESFLGIIHTMMVQYAKFNKMAQETTWHKPVSSINYIETSTWARQEHNGFSHQNPSFIGAVLRLKPTAARVYLPPDANTFLTTLHHCLKSKNYVNLMVGSKQPTPVYLSPEEAESHCRAGASIWRFCSTDNGLNPDVVLVGIGVEVMFEVIYAAAILRKRCPELRVRVVNVTDLMILEKEGLHPHALTTEAFDSLFGSDRPIHFNYHGYPGELKGLLFGRPRLDRVSVEGYMEEGSTTTPFDMMLLNRVSRYHVAQAAVIGASRRNEKVQVRQHELVSEFGHNIVETRKYILANRKDPDDTYDMPSFE

SEQ ID NO: 145 - DNA, 2368 bp, Neurospora crassa
atgggcggaacacagatcacaattcccaacccccctcctctaccatcccacctccccgaatgtcctcgacctggcagtccaaattgagcgcaagaacctcccagacaatgtccgcgtcgctgcgcgcattccagcgtgcaggatgctacattgccgcctccatgatcttcttgcgacaatgtcctcctccaagacaaactccaagtttcgcacatcaagccccgactcctcgcattggggaacatgccccggcctaatcctggtctggtcgcatctcaacgtcttgatccaaccatgacctcaacatgatttacgttatcggccccggccacggcgcccctgccgcccgcctctctgtggctcgaaggctcccttgagcgcttctaccctggcgaatacgaccgcagctactggtttgcgcaacctcatcacccgtttctctgtccccggcggttttcctagccatcaacgctgagactccaggtgcgatccatgagggtggtgagctcggatatgccctttgtctcgttcggcgccgtcatggacaaccccgatttgatcgtcacttgtgtggtaggcgggtgaggcggagactggcccgacagcaaccgcctggcatgctatcaagtacatcgaccaaggagtcaggtgccgtcatccccattctgcatgtcaacggcttcaagatcagcgagcaccatttttgggtgcatggacgacaaggagatcgcctgcttgtttagtggctacggatcaggtgcgcattgtggaagacctggagaacattgatgatgacctgcaaagttcgctggtgggctctagtcgagatcaagaagatccagaaggctgcgagggaggacaacaagccgagtgaagccgagatggccgatgattgtcctcagaacgcccaagggatggactggtcccagaggtggagggccaaatcatcgaaggatccttccactcccatcaagtcccccttcctagctggtagtgatgagaagcaactccaggctctagacgagtggctttccagctacaggaagcgagctccttgatgatgagggcaagcctactgaggccatcactcgtgtcttgcccagcagaaaagaggctcggtcaactcaagatcacatatgacccatacattcctctgaaacattgactggaagcagtttggcgttcaaaagggcgtcgacgaaagctgcatgaagagtgggcaagttcctcgacaagttgttccaagagaaccccaaaaccctccggctattctcccgacgagctcgagtcgaacaagctcaacgccatcctggatcacacacagcgcgactttctgggacgagttctcgagggcacatggcggtcgcgtcatcgaggttctctccgagcacatgccagggcttcatgcaaggatacactctcacgggccgcaccgccctcttcccctcctgagtccttcctgggtatcgttcacaccatgatggtgcaatactccaagttcgtcaagagcgcgtgaagtaccctggcgtggcgacctggcctccatcaactacatcgagacttcgatgggcgcgtcaagaacacaatggcttttcccatcagaacccctccttcattggtgctgcttaacctgaaggccgaggccgctcgcgtttacctcccgcccgacgccaactgcttccagcaccgtgcatcatgtcatggacagcaagaacaagaccaacctcatcatcggctccacagcccacggccgtctacctctctcccgccgaagcagccgaccactgtcgccagggtgtcgatctggcatttcgcctcttcctccgaccccaactcatccgcaggagagtcggtacgacccagatgtagtcctcgtcggcatcggcgtcgaagttacttttgaggtgattaaaggctgaactcttgcgctccattgcgcccgccctcaagatccgcgtcgtcaatgtgacggctgatgattctcatcgaagagtccaagcacccgcatgccctggccaaggccaagttcagaaatgttcaccgccgacagaccggtgttgttcaactaccatggctacccgacggaaccagggtctcttgtttgggagggaaaaggcggagcgcatggatgtcgagggttaccaaggagggaagcacgaccacgccgtttgatatgatgttgaggaaccgggtcagtcggttcggtggcgagctgggcgctgaagaggggtgcggagaggaatgcggaggtgaagaatgattgaaggtttgttgggtgacgtggataggagagtgaaggaggttcgtgagtttattgggagaaggaaaggatcccgatgatatctaccaactgcccaagttcgagtag

SEQ ID NO: 146 - protein, 815 aa, Neurospora crassa
MGGTQITIPNPPPLPSHLPDNVLDLAVQIERKNLPDNVRESLRAFQRAGCYIAASMIFLRDNVLLQDKLQVSHIKPRLLGHWGTCPGLILVWSHLNVLIRNHDLNMIYVIGPGHGAPAALASLWLEGSLERFYPGEYDRNATGLRNLITRFSVPGGFPSHINAETPGAIHEGGELGYALSVSFGAVMDNPDLIVTCVVGDGEAETGPTATAWHAIKYIDPKESGAVIPILHVNGFKISERTIFGCMDDKEIACLFSGYGYQVRIVEDLENIDDDLQSSLEWALVEIKKIQKAAREDNKPIVKPRWPMIVLRTPKGWTGPKEVEGQIIEGSFHSHQVPLPKAGSDEKQLQALDEWLSSYRISELLDDEGKPTEAITRVLPKAEKRLGQLKITYDPYIPLKLIDWKQFGVQKGVDESCMKSAGKFLDKLFQENPKTLRLFSPDELESNKLNAILDHTQRDFQWDEFSRAHGGRVIEVLSEHNCQGFMQGYTLTGRTALFPSYESFLGIVHTMMVQYSKFVKIAREVPWRGDLASINYIETSTWARQEHNGFSHQNPSFIGAVLNLKAEAARVYLPPDANCFLSTVHHVMDSKNKTNLIIGSKQPTAVYLSPAEAADHCRQGASIWHFASSSDPNSSAGESVQDPDVVLVGIGVEVTFEVIKAAELLRSIAPALKIRVVNVTDLMILIEESKHPHALAKAKFIEMFTADRPVLFNYHGYPTELQGLLFGREKAERMDVEGYQEEGSTTTPFDMMLRNRVSRFDVASWALKRGAERNAEVKNDLEGLLGDVDRRVKEVREFIGNEGKDPDDIYQLPKFE

SEQ ID NO: 147 - DNA, 2304 bp, Lactobacillus casei
atggatacaaaagtaaagactgttgattactcatccaaggaatactttgacaagatgagcttattggcgggcagccaactatatttcagttggtcaactttatttgaaggacaaccctgctggaacggccactgaagagcgaagacgtcaagccgcatccgatcggccattgggacgattgctgggcagaacttcatttatacccacttgaaccgggtgatcaataagtatgttgaacatgttttatattgaaggcccgggtcatggcggccaagtgatggtttccaatttatctagacggttcgtattcggagatttatccgcgtgtgtcgcaggataaagaaggcaaagaacctatttacgcagttctcatggccaggtggcgttgcttcacatgcgagtgcacacgccaggttccatccatgaaggtggcgaattaggttatgctttgagtcacgcaaccggcgattcttgataatcctgaggtcatcgcggcggttgtcacgggtgatggtgaaactgaccggcccattggctgcatcatggttcagcaatacgttcattaacccaatcacggatggcgattttaccgattgtgcatatgaacgggtttaagatttccaacccaactatcttgtcgtaagtcagatgaagatctagacaaatacttcagtggtatgggttggaagccattctgttgaaggcgatgatccagagaagctgaatccggaaatggctaaagttttggatgaagattgaagacattaaggccattcagaaacatgcacgtgagactggcgacaccacgatgccactggccagtgattattttccggtcaccaaagggctggacaggcccgaagagttggaggcgaaccaatcgaaggttccttccgtgcgcaccagattccgattcctgtcgacgctggacatggaacacgctgattccttggcaggctggctgaagtcctaccatccagaggaacttcgatgaaaacggcaagttgatccctgaattggctgcattgccgccaaagggtgagccggatggctgctaacccaattacgaacggtgggattgatccgaagccgttggtattgcgattatcgcaagtatgcgctggacaacaaggaacacggcaagcagattaagcaagacaatcgtgtggtctgattatctgcgtgatttgatcaagctgaatccgcataatttccggatttggccctgacgaaaccatgagtaaccggttgtatagcttgtttgaagtgaccaacccaatggctggaaccaatcaaggaaccggctgaccaatatttggcaccggctggccggaattgactcgcagttgtccgaacatcaggcggaaggctttaacgaaggctacacgttgaggccgtcatggcttattcaccagttacgaagctttcctccgggtcgtcgattccatgcactcagcacttcaagtggattcggaaggcacatgaagaaccatggcataaggcttatcagtctgaacgtggtctcaacatcgacttccttccagcaggatcacaatgggtacaccccaggacccaggtattttgacacacatggctgaaaagaaggctgaatacattcgcgagtctaccagctgatgccaacagcttgctggccatttctccgaagttgttcagctcacaaaaccgtgaacgtgctcatcacatccaagcagccgcggccacagttctatagcattgatggccactgttttggctaattccggcttgaagcggattgattgggcttccaatgatgatggtcgaaccagatgttgtcattgccgctgccggaaccgaaccaaacatggaaagtcttggccattaacttgctgcacgacgccttcccagatttgaagattcgcttcattaacgtgggacctgctgaagctgcgcagtccggaaatcgatccgcgcggtttgagtgatgctgaataacagctacttcaccaccgacaaaccgatcctcttcgcttatcatggctttgaagggtattcgcgacatcttcttcactcgcccgaatcgcaatgtgctgattcacggctatcgtggaaggtgacattaccacaccatttgacatgcgggtactcaacgaacttgaccgttaccttggccaaggatgttattcagcatgtgccagcctacgctgaaaaggctgccgcgtttgcagaagatggatgataccttgcaatatcatcatgacttcatccgcgcaaacggcgatgattccagaagttcaggaatggacctggaaaccaatcaagtaa

SEQ ID NO: 148 - protein, 793 aa, Lactobacillus casei
MDTKVKTVDYSSKEYFDKMTAYWRAANYISVGQLYLKDNPLLERPLKSEDVKPHPIGHWGTIAGQNFIYTHLNRVINKYDLNMFYIEGPGHGGQVMVSNSYLDGSYSEIYPRVSQDKEGMKNLFTQFSWPGGVASHASAQTPGSIHEGGELGYALSHATGAILDNPEVIAAVVTGDGETETGPLAASWFSNTFINPITDGAILPIVHMNGFKISNPTILSRKSDEDLDKYFSGMGWKPFFVEGDDPEKLNPEMAKVLDEAIEDIKAIQKHARETGDTTMPHWPVIIFRSPKGWTGPKSWNGEPIEGSFRAHQIPIPVDAEDMEHADSLAGWLKSYHPEELFDENGKLIPELAALPPKGEQRMAANPITNGGIDPKPLVLPDYRKYALDNKEHGKQIKQDMIVWSDYLRDLIKLNPHNFRIFGPDETMSNRLYSLFEVTNRQWLEPIKEPADQYLAPAGRIIDSQLSEHQAEGFNEGYTLTGRHGLFTSYEAFLRVVDSMLTQHFKWIRKAHEEPWHKAYPSLNVVSTSTSFQQDHNGYTHQDPGILTHMAEKKAEYIREYLPADANSLLAISPKLFSSQNTVNVLITSKQPRPQFYSIDEATVLANSGLKRIDWASNDDGVEPDVVIAAAGTEPNMESLAAINLLHDAFPDLKIRFINVVDLLKLRSPEIDPRGLSDAEFNSYFTTDKPILFAYHGFEGLIRDIFFTRPNRNVLIHGYREEGDITTPFDMRVLNELDRYHLAKDVIQHVPAYAEKAAAFVQKMDDTLQYHHDFIRANGDDIPEVQEWTWKPIK

SEQ ID NO: 149 - DNA, 2289 bp, Lactobacillus plantarum
atgacaacagattactcatcaccagcatatttgcaaaaagttgataagtactggcgtggccaactacttatcagttggtcaactttatttaaaagataatccactattacaacggcttgaaggccagtgacgttaaggttcatccaattggtcactgggggacgattgccggtcaactttatctatgctcatcttaaccgggtcatcaacaagtacggtttgaagatgttctgttgaaggtccaggtcatggtggtcaagtgatggtttcaaactcttaccttgacggtatacaccgatatttatccagaaattacgcaggatgttgaagggatgcaaaagctcttcacaattctcattcccaggtggggttgcttcccatgcggcacctgaaacacccggttcaacacgaaggtggcgaacttggttactcaatttcacacggggttggggcaattcttgacacctgacgaaatcgccgcggttgttgttggtgatggggaatccgaaacgggtccattagacttcatggcaatcaacgaagttcattaacccaatcaacgacggggctgttttaccaattgaacttaaatggttttaagatttctaatccaacgatttttggtcggacttctgatgaagattaaggaatacttcgaaagcatgaattgggaaccaatcttcgttgaaggtgacgcctgaaaaggttcacccagccttagctaaggccatggatgaagccgttgaaaagatcagcaatccagaagcatgctcgcgaaaataacgatgcaacattgccagtatggccaatgagtcttccgcgcacctaagggctggactggtccgaagtcatgggacggtgataagatcgggttcattccgtgctcatcaaattccgattcctgttgatcaaaatgacatggaacatggatgctttagttgattggctcgaatcatatcaaccaaaagaactcttcaatgaagatgtctttgaaggatgatattaaagaaattattcctactggggacagtcggatggctgctaccaatcaccaatggtggggtcgatccgaaagccttgaacttaccaaacttccgtgattgcggtcgatacgtccaaagaaggcgcgaatgttaagcaagatatgatcgtttggtcagtatttgcgggatgtcatcaagaaaaatcctgataacttccggttgttcggacctgatgaccatgtctaaccgtttatatggtgtcttcgaaaccactaatcgtcaatggatggaagattcatccagatagtgaccaatatgaagcaccagctggccgggtcttagatgctcagttctgaacaccaagctgaaggttggttagaaggttacgtcttaactggacgtcatgggttttgccagttatgaagccttcctacgcgttgtggactcaatgttgacgcaacacttcatggttacgtaaagccaatgaacttgattggcgtaaaaagtacccatcacttaacattagcggcttcaactgtattccaacaagaccataatggttatacccaccaagatccaggtgttaactcatttggccgaaaagaaaccagaatacattcgtgaatatttaccagccgatgaacacgttattagctgtcggtgacgtcattttccggagccaagaaaagatcaactacggttacgtcaaaacacccacgtcaacaatggttcagcattgaagaagctaagcaattaggacaatggtcttggtatcattgattgggcaagtacggaccaaggtagcgaaccagacagtctttgcagctgctgggacggaaccaacgcttgaaacgttggctgccatccaattaccacgacagtttcccagagatgaagattcgtttcgtgaacgtggtcgacatcttgaagtcgtagtcctgaaaaggatccgcggggcttgtcagatgctgagtttgaccattactttaaaggacaaaccagtggtctttgctttccacggttacgaagacttagttcgtgacatcttttgatcgtcacaaccataacttatacgtccacggttaccgtgaaaatggtgatattaacaccattcgacgtacgggtcatgaaccagatggaccgcttcgacttagctaagtcggattgcggcgcaaccagcaatggaaaacactggtgcggccttcgttcaatccatggataatgcttgctaaacacaatgcctatatccgggatgccggaactgacttgccagaagttagattggcaatggaagggtttaaaataa

SEQ ID NO: 150 - protein, 788 aa, Lactobacillus plantarum [sequence omitted]

SEQ ID NO: 151 - DNA, 2313 bp, Lactobacillus plantarum
atgagtgaagcaattaaatccaaaacagttgattactcttctgatgaatatctaaaacgttgatgaatattggcgtgctgctaactacatctcagttggtcaactctatctactaaaacccgttacttcgggaaccactaaaggcgaccgacgtgaaagttcatccaatcggcctggggcacgattgctggtcaaaactttatttatgcccatttaaaccgggcaatcaatatatggcttgaacatgttctacattgaaggccctggtcatggtggtcaagtaatggtttaactcctacttagatggcacctatacggaaacgtatcctaaaatcacccaagacaaaggggatgaaacgcttattcaagcaattctcattcccaggcggggttgcttcccatgccgcctaagacgcctggttcgatccatgaaggtggcgaacttggctactcaatcctgcatggctggtgcagtattagataatccaggtttaattgccgctaccgttgttggtgatggtgtctgaaactgggccattggcaacttcttggcaagttaacaagttccttaacccaattagacgggacagtcttgccaatcttgaacttaaacggcttcaagatttctaatccaacagctttcacgtgaatcacatgaagaacttgaagactactttaaaggtctaggctgggatccactttgttgaaggtacagaccctgccaagatgcacaaaattatggctgaagaattggaaagtcattgaagaaatccacgcaattcgtaagaacgccaaggataacaatgatgaatcgtcctaagtggccaatgattgttttccgggcacctaagggctggaccggtcctaagatgggacggcgaaccaattgaaggttcattccgggctcaccaaattccaattcctgtcgcgcaatcacatggaacacgccgacaaattagttgactggctcaaatcatacaaaccaggaattatttgatgaaaatggtactttaaaaccagaaattgccgcaatcatccctgaagcaagctcgtatggctgctaaccccgttactaacggcggtaagttaactaaagacttaaacaccaaatatcgatgattatgctttggacaacaagagtcacggtaaggaagacggttgacatgactgaacttggtaagtatatccgtgatttaattgagttgaacaaagacaacaaacttccgtggctggggtcctgacgaaaccttatctaacaaactaggcgctgcttttggataccaaacgtcagtggatggaaccaatccacgaacctaatgatgctttgttagcaccaaggccggattattgactccatgttgtcagaacacatggatgaagggatgttggaagtacaatttaaccggacgttacggtttcttcgcaagttatgaatcattcctgcgcgttggattcaatgttaacccaacacttcaagtggttacggaattctcacgaagaaaccccttcgggctgatgtaccttcactgaatgtgattgcatcatcaacagccttccaacaagatcaatggttactctcaccaagatccaggtatcatttcacacttggctgaaaagaagaccgtacgttcgtgcctatcttccaggtgatgccaatactttgattgcaacctttgataaggatccaaagcaaacaattgattaatttaatcattgccagcaagcaccctcgtccacaatttcacaatggacgaagctaagcgcttagttcgtgatggccttggtgttgttgattgggagcactgatcatggtgaagaacccgacgttgtcttcgcaactgccggctctgaaccaaactgaaagcttagctgccgtatcaatcttgcatgcacgcttccctgaaatgaagattcttcattaacgttgttgatcttctgaagctgaagaaagacgaccctcgtggtttatcaggctgaatttgatgctttcttcactaaggacaaaccagttatctttgcttatcatgcatgacgacttagtaaagaccatcttcttcgatcgccataaccataacttacacgttcatgtaccgcgaagaaggcgacattacaacgccattcgacatgcgtgttcgcaacgaactcgcgtttccacttagtcaaagctgccttattagcaacgccagcttatgccgaaaaaggtgcatgtcattcaagagatgaacagcattttagacaagcatcatgactatatccgtgctgggtaccgatattccagaagttgaaaactggaaatggactgcattgaagtag

SEQ ID NO: 152 - protein, 796 aa, Lactobacillus plantarum [sequence omitted]

SEQ ID NO: 153 - DNA, 2396 bp, Bifidobacterium adolescentis
atgacgagtcctgttattggcaccccttggaagaagctgaacgctccggtttccgagggctatcgaaggcgtggataagtactggcgcgcagccaactacctctccatcggccagatatctgcgtagcaacccgctgatgaaggagcctttcacccgcgaagacgtcaagcaccctggtcggtcactggggcaccaccccgggcctgaacttcctcatcggccacatcaaccctcattgctgatcaccagcagaacactgtgatcatcatgggcccgggccacggcggccgctggtaccgctcagtcctacctggacggcacctacaccgagtacttcccgaacatcaaaggatgaggctggcctgcagaagttcttccgccagttctcctacccgggtggcatcctcccactacgctccggagaccccgggctccatccacgaaggcggcgagctgggttacgctgtcccacgcctacggcgctgtgatgaacaacccgagcctgttcgtcccggccatcgggcgacggtgaagctgagaccggcccgctggccaccggctggcagtccaacaagctcaaacccgcgcaccgacggtatcgtgctgccgatcctgcacctcaacggctacaagatcgaacccgaccatcctgtcccgcatctccgacgaagagctccacgagttcttccacggcaggctatgagccgtacgagttcgtcgctggcttcgacaacgaggatcacctgtcgatcccgtcgtttcgccgagctgttcgagaccgtcttcgacgagatctgcgacatcaaggccggctcagaccgacgacatgactcgtccgttctacccgatgatcatcttccgtaccccgaggctggacctgcccgaagttcatcgacggcaagaagaccgagggctcctggcgttccccaggtgccgctggcttccgcccgcgataccgaggcccacttcgaggtcctcaagaactctcgagtcctacaagccggaagagctgttcgacgagaacggcgccgtgaagccggaagaccgccttcatgccgaccggcgaactgcgcatcggtgagaacccgaacgccaacggtgcgcatccgcgaagagctgaagctgccgaagctggaagactacgaggtcaaggaagtcggagtacggccacggctggggccagctcgaggccacccgtcgtctgggcgtctacacccgacatcatcaagaacaacccggactccttccgtatcttcggaccggatgagaccgcttaaccgtctgcaggccgcttacgacgtcaccaacaagcagtgggacgccggctacctgtgctcaggtcgacgagcacatggctgtcaccggccaggtcaccgagcagctttccgagccagatggaaggcttcctcgagggctacctgctgaccggccgtcacggcatctggagcttatgagtccttcgtgcacgtgatcgactccatgctgaaccagcacgccaagtggctcggctaccgtccgcgagattccgtggcgcaagccgatctcctccatgaacctgctcgtcttcccacgtgtggcgtcaggatcacaacggcttctcccaccaggatccgggtgtcacctgtcctgctgaacaagtgcttcaacaacgatcacgtgatcggcatctacttcccggtggtccaacatgctgctcgctgtggctgagaagtgctacaagtccaccaacaagatcaacgatcatcgccggcaagcagccggccgccacctggctgaccctggacgaagctcgcgccgctcgagaagggtgctgccgagtggaagtgggcttccaacgtgaagtccaacgatgaggcagatcgtgctcgccgccaccggtgatgttccgactcaggaaatcatggccgctgccgaagctggacgccatgggcatcaagttcaaggtcgtcaacgtggttgacctggtcaagccagtccgccaaggagaacaacgaggccctctccgatgaggagttcgctgagctgttcagaggacaagccggtcctgttcgcttaccactcctatgcccgcgatgtgcgtggtctgatacgatcgcccgaaccacgacaacttcaacgttcacggctacgaggagcagggctccaaccaccccgtacgacatggttcgcgtgaacaacatcgatcgctacgagctccaggctggctctgcgcatgattgacgctgacaagtacgccgacaagatcaacgagctcgaggcctcgtcaggaagccttccagttcgctgtcgacaacggctacgatcacccggattacaccgtgggtctactccggtgtcaacaccaacaagcagggtgctatctccgctaccgccgcaagctggcgataacgagtga

SEQ ID NO: 154 - protein, 825 aa, Bifidobacterium adolescentis
MTSPVIGTPWKKLNAPVSEEAIEGVDKYWRAANYLSIGQIYLRSNPLMKEPFTREDVKHRLVGHWGTTPGLNFLIGHINRLIADHQQNTVIIMGPGHGGPAGTAQSYLDGTYTEYFPNITKDEAGLQKFFRQFSYPGGIPSHYAPETPGSIHEGGELGYALSHAYGAVMNNPSLFVPAIVGDGEAETGPLATGWQSNKLINPRTDGIVLPILHLNGYKIANPTILSRISDEELHEFFHGMGYEPYEFVAGFDNEDHLSIHRRFAELFETVFDEICDIKAAAQTDDMTRPFYPMIIFRTPKGWTCPKFIDGKKTEGSWRSHQVPLASARDTEAHFEVLKNWLESYKPEELFDENGAVKPEVTAFMPTGELRIGENPNANGGRIREELKLPKLEDYEVKEVAEYGHGWGQLEATRRLGVYTRDIIKNNPDSFRIFGPDETASNRLQAAYDVTNKQWDAGYLSAQVDEHMAVTGQVTEQLSEHQMEGFLEGYLLTGRHGIWSSYESFVHVIDSMLNQHAKWLEATVREIPWRKPISSMNLLVSSHVWRQDHNGFSHQDPGVTSVLLNKCFNNDHVIGIYFPVDSNMLLAVAEKCYKSTNKINAIIAGKQPAATWLTLDEARAELEKGAAEWKWASNVKSNDEAQIVLAATGDVPTQEIMAAADKLDAMGIKFKVVNVVDLVKLQSAKENNEALSDEEFAELFTEDKPVLFAYHSYARDVRGLIYDRPNHDNFNVHGYEEQGSTTTPYDMVRVNNIDRYELQAEALRMIDADKYADKINELEAFRQEAFQFAVDNGYDHPDYTDWVYSGVNTNKQGAISATAATAGDNE

SEQ ID NO: 155 - DNA, 2326 bp, Bifidobacterium bifidum
atggacaagtactggcgcgttgccaactacctttccatcggccagatctatctgcggaaacccgctgatgaaggaacccttcacccgtgaagacgtgaagcaccgtctggtggggctggggcaccacccctggcctgaacttcctcatcggccacatcaaccgcttcatcgctgcacggccagaacaccgtgttcatcatgggcccgggccacggtggccccgccggtacctcagtcctacctggacggcacctacaccgagacgtaccccaacattaccaaggatgaggggcctgcagaagttcttccgccagttctcctacccgggcggcatcccctcccacttcgccggaaaccccgggctccatccacgagggtggcgagctgggttacgccctgtcccacgtatggcgcgatcatggacaacccgagcctgttcgttccctgcatcgtcggcgatggtggccgagaccggcccgctggccaccggctggcagtccaacaagctcgtgaacccgcgcagacggtatcgtgctgccgatcctgcaccttaacggctacaagatcgccaacccgaccactgtcgcgcatctccgacgaagagctccacgagttcttccacggcatgggctacgagctatgagttcgtcgccggcttcgacgatgaggaccacatgtccatccaccgtcgcttcggagctgttcgagtccgtgtgggacgagatctgcgacatcaaggccgcggcgaacacggaacatgcaccgtccgttctacccgatgatcatcttccgcaccccgaagggctggacctccgaagtacatcgacggcaagaagaccgagggctcctggcgcgcccaccaggtgccgcgcttccgcccgcgacaccgaggcccacttcgaggtcctcaagaactggctggagtcctaagccggaagagctgttcgacgccaacggtgccgtcaaggacgacgtcctggccttcaccgaagggcgagctgcgcatcggcgccaacccgaacgccaacggtggcgtgatccgcagatctcgtgctgccggcgctcgaggactacgaggtcaaggaagtcaaggagttcggacggctggggccagctcgaggccacccgtcgtctgggcgtctacacccgcgacatcatcaaacaacatgcacgacttccgcatcttcggaccggatgagaccgcttccaaccgtctgcgcttcctacgaggtcaccaacaagcagtgggacgccggctacatctccgacgaggttggagcacatgcacgtctccggccaggtcgtcgagcagctgtccgagcaccagatggaagttcctcgaggcctacctgctgaccggccgtcacggcatctggagctcctacgagtcctgtgcacgtgatcgactccatgctgaaccagcacgccaagtggcttgaggctaccgtccgagattccgtggcgcaagccgattgcctccatgaacctgctggtctcctcgcacgtgtcgtcaggatcacaacggtttctcgcaccaggacccgggtgtcacctccgtcctgctgaaagtgcttccacaacgatcacgtcatcggcatctacttcgcgaccgacgcgaacatgcctggccatcgccgagaagtgctacaagtccaccaacaagatcaacgccatcatcgccgaagcagccggccgccacctggctgaccctggacgaggctcgtgccgagctcgccaagggccgccgcttgggattgggcttccaccgcgaagaccaacgatgaggctcaggtcgtgcgccgccgccggcgacgtcccgacccaggagatcatggccgcttccgacaagttgaaggctgggcatcaagttcaaggtcgtcaacgtggctgatctgctctccctgcagtctgccagagaacgacgaagcgctgaccgacgaggagttcgccgacatcttcaccgccgacaagcgtgctgttcgcgtaccactcctacgcccacgacgtgcgtggcctgatctacgatcgccaaccacgataacttcaacgtccacggctacgaggaggagggctccaccaccaccccgtgacatggttcgcgtgaacgagctggatcgctacgagctgaccgccgaagccctgcgcaatcgacgccgacaagtacgccgacgagatccagaagctggaggacttccgtcaggaagttccagttcgcggtcgacaagggctacgaccacccggactacaccgactgggtgtactggcgtcaagaccgacaagaagggcgccgtcaccgccaccgccgccaccgctggcgacagagtga

SEQ ID NO: 156 - protein, 801 aa, Bifidobacterium bifidum
MDKYWRVANYLSIGQIYLRSNPLMKEPFTREDVKHRLVGHWGTTPGLNFLIGHINRFIADHGQNTVFIMGPGHGGPAGTSQSYLDGTYTETYPNITKDEAGLQKFFRQFSYPGGIPSHFAPETPGSIHEGGELGYALSHAYGAIMDNPSLFVPCIVGDGEAETGPLATGWQSNKLVNPRTDGIVLPILHLNGYKIANPTILSRISDEELHEFFHGMGYEPYEFVAGFDDEDHMSIHRRFAELFESVWDEICDIKAAANTDNMHRPFYPMIIFRTPKGWTCPKYIDGKKTEGSWRAHQVPLASARDTEAHFEVLKNWLESYKPEELFDANGAVKDDVLAFMPKGELRIGANPNANGGVIRRDLVLPALEDYEVKEVKEFGHGWGQLEATRRLGVYTRDIIKNNMHDFRIFGPDETASNRLQASYEVTNKQWDAGYISDEVDEHMHVSGQVVEQLSEHQMEGFLEAYLLTGRHGIWSSYESFVHVIDSMLNQHAKWLEATVREIPWRKPIASMNLLVSSHVWRQDHNGFSHQDPGVTSVLLNKCFHNDHVIGIYFATDANMLLAIAEKCYKSTNKINAIIAGKQPAATWLTLDEARAELAKGAAAWDWASTAKTNDEAQVVLAAAGDVPTQEIMAASDKLKALGIKFKVVNVADLLSLQSAKENDEALTDEEFADIFTADKPVLFAYHSYAHDVRGLIYDRPNHDNFNVHGYEEEGSTTTPYDMVRVNELDRYELTAEALRMIDADKYADEIQKLEDFRQEAFQFAVDKGYDHPDYTDWVYSGVKTDKKGAVTATAATAGDNE

SEQ ID NO: 157 - DNA, 2399 bp, Bifidobacterium gallicium
atgacaagtcctgttattggcaccccctggcagaagctgaaccgtccggtttcggaaggccatcgaaggcatggacaagtattggcgcgcgtccaactacatgtccatcggccagatacctgcgtagcaacccgctgatgaaggaacctttcactcgcgatgacgtgaagtaccctcgtcggccactggggtaccaccccgggcctgaacttccttctggcccacatcaaccctgatcgctgaccaccagcagaacaccgtgttcatcatgggtcctggccacggcggtcgccggtactgcacagtcctatctggacggcacgtacaccgagtactacccgaacatcaaaggatgaggaaggcctgcagaagttcttccgtcagttctcttatccgggcggcattctcgcacttcgctccggagaccccgggctcgatccacgaaggtggcgagctgggctatgctgtcccacgcttacggcgctgtgatgaacaacccgagcctgttcgtgccctgcatcgggcgacggcgaagctgagactggccctctggccaccggctggcagtccaacaagctcgaacccgcgcaccgatggcatcgtgctgccgatcctgcacctcaacggctacaagatcgaacccgaccatcctcgctcgcgtgtccgatgaagagctgcatgacttcttccgcggccggctaccacccgtacgagttcgtcgccggcttcgacaacgaggatcacctgtcgatcccgtcgtttcgctgagctcttcgagaccatcttcgacgagatctgcgatatcaaggctggccaacacggatgacatgacccgtccgttctacccgatgctgattttccgcaccccgaggttggacctgcccgaagttcatcgacggcaagaagaccgaaggctcttggcgtgcaccaggtgccgctggcttccgcccgcgataccgaggctcacttcgaagtgctgaagaactatggcttcctacaagccggaagagctcttcgacgacaagggcgccatcaaggatgacggtcgacttcatgccgaagggcgatctgcgtatcggcgccaacccgaatgctaacggtggtgatccgtgaagagctcgatctgccggccctcgagaactatgaggtcaaggaagtcagaattcggccacggctggggccagcttgaggctacgcgtaagctcggtgagtacacgcgacatcatcaagaacaacccggattcgttccgcatcttcggacctgacgagaccgcttaaccgtctgcaggcttcctacgaagtcaccaacaagcagtgggacaacggctacctgtaaggacctcgtcgatgagcacatggctgtcaccggccaggtcactgagcagctctccgcaccagtgcgaaggcttcctcgaggcctacctgctcacgggtcgtcacggcatctggatcctacgagtccttcgtgcacgtcatcgactccatgctcaaccagcacgccaagtggcgaggctacggtgcgtgagattccgtggcgtaagccgatctcctcgatgaacctgctcgtcctcgcacgtgtggcgtcaggatcacaacggcttctcgcaccaggatccgggtgtcatccgtcctgttgaacaagacgttcaacaacgatcacgtcatcggcctgtacttcgcaagacgccaacgtgctgctggccatcgctgagaagtgctacaagtcgaccaacatgatcagccatcgtcgccggcaagcagcctgctgccacctggacgacgctggacgaagctcgtgctggttgccaagggcgctggcgaattcgagtgggcttcgaacgtcaagaccaacgatggccgagattgtgctcgcttccgctggcgatgttccgactcaggagctcatggctgctggatcgtctgaacaagctcggcgtcaagttcaaggtcgtcaacgtggtggatctgatcactgcagtccgccaaggagaacgatcaggctctgtccgatgccgagttcgctgagctctaccgaagacaagccggtgctgttcgcgtaccactcctatgcgcacgacgtgcgcggccatcttcgatcgcccgaaccacgacaacttcaacgtggtcggctacaaggagcagggctaccaccacgccgtacgacatggtgcgtgtcaacgacatcgatcgttatgagctgaccgacggcactgcgcatgatcgacgccgacaagtacgccgacgagatcaagaagctcgaggttccgcatcgaggcttaccagttcgctgtcgacaacggctacgacattccggattacagactgggtgtggccgggcgtcaagaccgacctgccgggcgccgtttccgcaacggctgaccgcaggcgacaacgagtga

SEQ ID NO: 158 - protein, 826 aa, Bifidobacterium gallicium
MTSPVIGTPWQKLNRPVSEEAIEGMDKYWRASNYMSIGQIYLRSNPLMKEPFTRDDVKYRLVGHWGTTPGLNFLLAHINRLIADHQQNTVFIMGPGHGGPAGTAQSYLDGTYTEYYPNITKDEEGLQKFFRQFSYPGGIPSHFAPETPGSIHEGGELGYALSHAYGAVMNNPSLFVPCIVGDGEAETGPLATGWQSNKLVNPRTDGIVLPILHLNGYKIANPTILARVSDEELHDFFRGLGYHPYEFVAGFDNEDHLSIHRRFAELFETIFDEICDIKAAANTDDMTRPFYPMLIFRTPKGWTCPKFIDGKKTEGSWRAHQVPLASARDTEAHFEVLKNWMASYKPEELFDDKGAIKDDVVDFMPKGDLRIGANPNANGGVIREELDLPALENYEVKEVKEFGHGWGQLEATRKLGEYTRDIIKNNPDSFRIFGPDETASNRLQASYEVTNKQWDNGYLSKDLVDEHMAVTGQVTEQLSEHQCEGFLEAYLLTGRHGIWSSYESFVHVIDSMLNQHAKWLEATVREIPWRKPISSMNLLVSSHVWRQDHNGFSHQDPGVTSVLLNKTFNNDHVIGLYFATDANVLLAIAEKCYKSTNMINAIVAGKQPAATWTTLDEARELVAKGAGEFEWASNVKTNDEAEIVLASAGDVPTQELMAAADRLNKLGVKFKVVNVVDLIKLQSAKENDQALSDAEFAELFTEDKPVLFAYHSYAHDVRGLIFDRPNHDNFNVVGYKEQGSTTTPYDMVRVNDIDRYELTATALRMIDADKYADEIKKLEDFRIEAYQFAVDNGYDIPDYTDWVWPGVKTDLPGAVSATAATAGDNE

SEQ ID NO: 159 - DNA, 2396 bp, Bifidobacterium animalis
atgactaatcctgttattggtaccccatggcagaagctggaccgtccggtttccgaaggccatcgaaggcatggacaagtactggcgcgtcgccaactacatgtccatcggccagatacctgcgtagcaacccgctgatgaaggagcccttcacccgcgatgacgtgaagcaccctggtcggccactggggcaccaccccgggcctgaacttccttctcgcccatatcaaccctgatcgccgatcaccagcagaacaccgtgttcatcatgggtcctggccacggcggccgcaggtaccgctcagtcctacatcgacggcacctacaccgagtactacccgaacatcaaaggacgaggctggcctgcagaagttcttccgccagttctcctacccgggtggcattctcccacttcgctccggagacgccaggctccatccacgaaggcggcgagctgggctacgctgtcgcacgcctacggcgcgatcatgaacaacccgagcctcttcgtcccgtgcatcaggtgacggcgaagccgagaccggccctctggccaccggctggcagtccaacaagctcgaacccgcgcaccgacggcatcgtgctgccgatcctgcacctcaacggctacaagatcgaacccgacgctcctcgcccgcatctccgacgaggagctgcacgacttcttccgcggtaggttaccacccgtacgagttcgtcgccggcttcgacaacgaggatcacctgtcgatcccgtcgcttcgccgagctcttcgagaccatcttcgacgagatctgcgatatcaaggctggctcagaccgacgacatgacccgtccgttctacccgatgctcatcttccgcaccccgaggctggacctgcccgaagttcatcgacggcaagaagaccgaaggctcctggcgtgcaccaggtcccgctggcttccgcccgcgacaccgaggcccacttcgaagtcctcaagggctatggaatcctacaagccggaggagctcttcaacgccgacggctccatcaaggacgacgaccgcattcatgcctaagggcgaactgcgcatcggcgccaacccgaacgccaacggtgcgcatccgcgaggatctgaagctccctgagctcgatcagtacgagatcaccggcgtcagaatacggccatggctggggccaggtcgaggctccgcgctccctcggcgcgtactgccgacatcatcaagaacaacccggattcgttccgcatcttcggacctgatgagaccgcataaccgtctgaacgcgacctacgaggtcaccaagaagcagtgggacaacggctatctctgctctcgtcgacgagaacatggctgtcaccggccaggttgtcgagcagctctccgagccagtgcgaaggcttcctcgaggcctacctgctcacgggccgccacggcatgtggagcatatgagtccttcgcccacgtgatcgactcgatgctcaaccagcatgcgaagtggctcggcgaccgtccgcgagatcccgtggcgcaagccgatctcctcggtcaacctcctcgtcttcgcacgtgtggcgtcaggaccacaacggcttctcgcatcaggacccgggtgtcacctgtcctgatcaacaagacgttcaacaacgaccacgtgacgaacatctacttcgcgaccggccaacatgctgctcgcgatcgccgagaagtgcttcaagtccaccaacaagatcaacgatcttctccggcaagcagccggctccgacctggattaccctcgacgaggctcgtgccgctcgaggccggcgccgccgagtggaagtgggcttccaacgccaagagcaacgacgaggcagattgtcctcgccgccgcaggcgatgtcccgacccaggagatcatggccgcttccggccctgaacaaggatggcatcaagttcaaggtcgtcaacgttgttgacctcctgaagccagtccccggagaacaacgacgaggccatgtcgaacgaagacttcaccgagctcttcagccgacaaaccggttctgttcgcctaccactcctatgcccaggacgttcgtggtcttatacgaccgcccgaaccacgacaacttcaacgttgtcggctacaaggagcagggctccaaccacgccgttcgacatggtccgcgtcaacgacatggatcgctacgcgctcgaagctcgctctcgagctgatcgacgccgacaagtatgccgacaagatcgacgagctcaacgcgtcgcaagaccgcgttccagttcgccgtcgacaacggctacgacatcccggagttcaccgtgggtgtacccggacgtcaaggtcgacgagacgcagatgctctccgcgaccgcggcgagctggcgacaacgagtga

SEQ ID NO: 160 - protein, 825 aa, Bifidobacterium animalis
MTNPVIGTPWQKLDRPVSEEAIEGMDKYWRVANYMSIGQIYLRSNPLMKEPFTRDDVKHRLVGHWGTTPGLNFLLAHINRLIADHQQNTVFIMGPGHGGPAGTAQSYIDGTYTEYYPNITKDEAGLQKFFRQFSYPGGIPSHFAPETPGSIHEGGELGYALSHAYGAIMNNPSLFVPCIIGDGEAETGPLATGWQSNKLVNPRTDGIVLPILHLNGYKIANPTLLARISDEELHDFFRGMGYHPYEFVAGFDNEDHLSIHRRFAELFETIFDEICDIKAAAQTDDMTRPFYPMLIFRTPKGWTCPKFIDGKKTEGSWRAHQVPLASARDTEAHFEVLKGWMESYKPEELFNADGSIKDDVTAFMPKGELRIGANPNANGGRIREDLKLPELDQYEITGVKEYGHGWGQVEAPRSLGAYCRDIIKNNPDSFRIFGPDETASNRLNATYEVTKKQWDNGYLSALVDENMAVTGQVVEQLSEHQCEGFLEAYLLTGRHGMWSTYESFAHVIDSMLNQHAKWLEATVREIPWRKPISSVNLLVSSHVWRQDHNGFSHQDPGVTSVLINKTFNNDHVTNIYFATDANMLLAIAEKCFKSTNKINAIFSGKQPAPTWITLDEARAELEAGAAEWKWASNAKSNDEVQIVLAAAGDVPTQEIMAASDALNKDGIKFKVVNVVDLLKLQSPENNDEAMSNEDFTELFTADKPVLFAYHSYAQDVRGLIYDRPNHDNFNVVGYKEQGSTTTPFDMVRVNDMDRYALEAQALELIDADKYADKIDELNAFRKTAFQFAVDNGYDIPEFTDWVYPDVKVDETQMLSATAATAGDNE

SEQ ID NO: 161 - DNA, 2289 bp, Lactobacillus pentosus
atgtctacagattactcatcaccagcatatttgcaaaaagttgataagtactggcgtggccaactatttatcagttggtcaactttatttaaaagataatcctttattacaacggcttaaaggctagtgacgttaaggttcacccaatcggtcactggggcacgattgccggccaacttcatctatgcgcatcttaaccgggtcatcaacaagtacggtttgaagatgttctgttgaaggtccaggtcatggtggccaagtgatggtctccaactcataccttgatgggatacacggatatttatcctgaaattacgcaggatgttgaagggatgcaaaaactcttcacaattctcattcccaggtggcgtggcttcccatgctgctcctgaaacaccaggctcaacacgaaggtggcgaacttggttactcaatttcacacggtgttggggcaatccttgacacctgatgaaatcgccgcagtcgttgttggtgatggggaatccgaaaccggcccattagacttcatggcaatcaacgaagttcatcaacccaatcaacgatggggcagtgttaccaattgaaccttaacggctttaagatttctaacccaacgatttttggtcggacttctgatgaagatcaagcaatacttcgaaagcatgaactgggaaccaatctttgttgaaggtgacgcctgaaaaggttcacccagctttagctaaggccatggatgaagccgtcgaaaagatcagccattcaaaagaacgctcgtgaaaacgatgacgctactttaccagtatggccgatgagtcttccgcgcacctaagggctggactggtcctaagtcatgggatggcgacaagatcgggttcattccgagctcaccaaattccaattcctgttgaccaaaccgacatggaacatggatgcgttagttgactggttggaatcatatcaaccaaaggaactcttcaatgaagatgtctttgaaggatgatatcaaagaaattatcccaactggcgatgcacggatggccgctaccaatcactaatggtggggttgatccaaaggccttgaacttacctaacttccgtgattgccgttgatacgtctaagcatggtgccaacgttaagcaagatatgatcgtttggtcagtacttgcgtgatgttatcaagaagaacccagataacttccggttatttggccctgatgaccatgtcaaaccggttatatggtgtctttgaaaccactaaccgtcaatggatggaagattcacccagatagtgaccaatacgaagcacctgctggccgggtcttggatgctcaattctgaacaccaagctgaaggttggttagaaggttacgtcttaactggtcgtcatggcttttgcaagttacgaagccttcttacgggttgtcgactcaatgttgacgcaacacttcatggttacgtaaggccaacgaacttgactggcggaagaagtacccgtcactcaacattagcggcttcaactgtgttccaacaagaccataatgggtacacccaccaagatccaggtgttgactcatttggctgaaaagaagcctgaatatatccgcgaatatttaccagccgacgaactccttgttagctgttggggacgtcatcttccgtagccaagaaaagatcaactacggttacgtcgaagcacccacgtcaacaatggttcagcattgaagaagctaagcaattaggacaacggtcttggtatcattgactgggcaagcacggaccaaggtagcgaaccagatagtgtttgctgctgccggaacggaaccaacgcttgaaacgttggctgcaatccaattgccatgatagcttcccagacatgaagattcgtttcgtgaacgtggtcgacatcttgaagtcgtagccctgaaaaggaccctcgtggcttgtcagatgctgaatttgaccattacttcaaaggacaaaccagttgtcttcgccttccatggttacgaagacctggttcgtgacatcttttgatcgtcacaaccacaacttacacgtgcatggctaccgtgaaaatggtgacattaacaccattcgatgtccgggtcatgaaccaaatggaccgtttcgacttagcaaaatctgattgcggcgcaaccagcaatggaaaacaccggtgcagcctttgttcaagacatggataatgcttgcaaaacacaacgcatacatccgtgacgccggaaccgacttgccagaagttagactggcaatggaaaggtttgaaataa

SEQ ID NO: 162 - protein, 788 aa, Lactobacillus pentosus
MSTDYSSPAYLQKVDKYWRAANYLSVGQLYLKDNPLLQRPLKASDVKVHPIGHWGTIAGQNFIYAHLNRVINKYGLKMFYVEGPGHGGQVMVSNSYLDGTYTDIYPEITQDVEGMQKLFKQFSFPGGVASHAAPETPGSIHEGGELGYSISHGVGAILDNPDEIAAVVVGDGESETGPLATSWQSTKFINPINDGAVLPILNLNGFKISNPTIFGRTSDEKIKQYFESMNWEPIFVEGDDPEKVHPALAKAMDEAVEKIKAIQKNARENDDATLPVWPMIVFRAPKGWTGPKSWDGDKIEGSFRAHQIPIPVDQTDMEHADALVDWLESYQPKELFNEDGSLKDDIKEIIPTGDARMAANPITNGGVDPKALNLPNFRDYAVDTSKHGANVKQDMIVWSDYLRDVIKKNPDNFRLFGPDETMSNRLYGVFETTNRQWMEDIHPDSDQYEAPAGRVLDAQLSEHQAEGWLEGYVLTGRHGLFASYEAFLRVVDSMLTQHFKWLRKANELDWRKKYPSLNIIAASTVFQQDHNGYTHQDPGALTHLAEKKPEYIREYLPADANSLLAVGDVIFRSQEKINYVVTSKHPRQQWFSIEEAKQLVDNGLGIIDWASTDQGSEPDIVFAAAGTEPTLETLAAIQLLHDSFPDMKIRFVNVVDILKLRSPEKDPRGLSDAEFDHYFTKDKPVVFAFHGYEDLVRDIFFDRHNHNLHVHGYRENGDITTPFDVRVMNQMDRFDLAKSAIAAQPAMENTGAAFVQDMDNMLAKHNAYIRDAGTDLPEVNDWQWKGLK

SEQ ID NO: 163 - DNA, 2237 bp, Lactobacillus acidophilus
atgaaaaatccgttgttaaagaaacctttaacagctgaagatgtaaaacctaagccaaggtcactggggtactattgctccacaaaactttatttatgctcacttaaatcgtgcgcaaaaaatatgacttggatatgttctatattgaaggttcaggtcacggtggccaagtgagtttcaaattcatatcttgatggttcatatactgaacgttatccagaaattacccaaggaaaagggtatggctaaattgtttaagcgctttagtttcccaggtggtgtagcttctcgctgctcctgaaactccaggttctattcatgaaggtggggaattaggatacgcactttcatggggtaggtgctattttagacaatccagatgtaattgctgccgttgaaattggtgggtgaagcagaaactggtccacttgcagctagctggttcagtgacaagtttattaatcattaaggatggtgcagttttaccaattcttcaaattaatggtttcaagatttctaaccactatcgtttcaagaatgagcgatgaagaattaactgaatacttccgtggcatgggttgatccgcactttgtttcagtatttaagggtggccgctttgacggtgaaaaggatccaacaagtccacgaagaaatggctaaaaccatggacgaagtaattgaagaaattaaggctacaaaagcatgctcgtgaaaataatgatgctactttgccacattggccattgattatctcaatgtccaaagggctggaccggtccaaagaaggatcttgacggcaatccaattgaaatcatttagagcacaccaaattccaattcctgtctcacaatacgatatgaaacatgttgatgttgactgattggcttgaaagttataagccaaacgaattattcaacgaagatggttccaaaggaaattgttactgaaaacactgctaagggtgatcaacgtatggcaatgaatcatcactaatggtggtaaggatcctaaacgattgaacctaccagattatcgcaactttgcttaagtttgacaagccaggttcagttgaagcacaagacatggttgaatgggctaaatttaaacgaagttgctaaacttaacccaactactttccgtggctttggtcctgatgaataaatcaaaccgtttatttaaacttttagatgatcaaaagcgtcaatgggaacctgaagcatgaaccaaatgatgaaaacttggcaccaagtggccgcgttatcgattcacaattatgaacaccaagacgaaggcttccttgaaggctacgttttaactggtcgtcacggcttctgcaacctacgaagcatttggtcgtgtagtagattcgatgcttactcaacatatgaagtcttagaaaagctaaagaacaatattggcgtcatgattatccatcacttaactttgttgacttcaacagtattccaacaagatcacaatggttacactcaccaagatccaggcatttactcacttatatgaaaagaatcgtccagatttagttcatgaatacttgccatcagataaatactttacttgctgtaggtaacaaggcatttactgatcgtgaatgtattaatgtttgtaacttcaaagcaacctcgtccacaatggttctcaattgaggaagcacaaaagttaggataaaggtttaagttacattgattgggcttcaactgataaaggtgtaaaaccagatagtctttgcttcaacagaaactgaaccaacaattgaaactttggcagcaattgatatttcatgacaagttcccagatcttaagattcgctacattaacgtaattgatgtgatgaaatatgtcaccaaaggacaataagaatggtatttctgatgaagaatttgatcgcttattccaaggacgttcctgtaatctttgcatggcacggctacaagagtatgatggaatcaattttttgcacgtaaccgtcataatgtacatattcactgctacgaagaaaacggtgatattaaccccatttgatatgcgtgttttgaaccaccttgacagatttgatcttgccaaagatggttgaaagtgttgataaattgaagggcaagaacgctgactttatcagtcatatggatgttgcttgaaaagcaccaccaatacattcgtgataatggtaaagatatgccagaagttagaatggaagtggaagggcttgaagaatgacagt

SEQ ID NO: 164 - protein, 799 aa, Lactobacillus acidophilus
MTVNYDSKDYLKSVDAYWRAANYLSVGQLFLMKNPLLKKPLTAEDVKPKPIGHWGTIAPQNFIYAHLNRALKKYDLDMFYIEGSGHGGQVMVSNSYLDGSYTERYPEITQDEKGMAKLFKRFSFPGGVASHAAPETPGSIHEGGELGYALSHGVGAILDNPDVIAAVEIGDGEAETGPLAASWFSDKFINPIKDGAVLPILQINGFKISNPTIVSRMSDEELTEYFRGMGWDPHFVSVFKGGRFDGEKDPMQVHEEMAKTMDEVIEEIKAIQKHARENNDATLPHWPLIIFQCPKGWTGPKKDLDGNPIENSFRAHQIPIPVSQYDMKHVDMLTDWLESYKPNELFNEDGSPKEIVTENTAKGDQRMAMNPITNGGKDPKRLNLPDYRNFALKFDKPGSVEAQDMVEWAKYLNEVAKLNPTTFRGFGPDESKSNRLFKLLDDQKRQWEPEVHEPNDENLAPSGRVIDSQLSEHQDEGFLEGYVLTGRHGFFATYEAFGRVVDSMLTQHMKWLRKAKEQYWRHDYPSLNFVATSTVFQQDHNGYTHQDPGILTHLYEKNRPDLVHEYLPSDTNTLLAVGNKAFTDRECINVLVTSKQPRPQWFSIEEAQKLVDKGLSYIDWASTDKGVKPDIVFASTETEPTIETLAAIDILHDKFPDLKIRYINVIDVMKLMSPKDNKNGISDEEFDRLFPKDVPVIFAWHGYKSMMESIWFARNRHNVHIHCYEENGDITTPFDMRVLNHLDRFDLAKDAVESVDKLKGKNADFISHMDDLLEKHHQYIRDNGKDMPEVTEWKWKGLK

SEQ ID NO: 165 - DNA, 2387 bp, Penicillium chrysogenum
atgcctgcagaagttataagcgaaccaaatccacaagctctgccgtcgcatctgccagtatcttgagaaattgagcgtcagcttggaacgtgagaaactagatgaaaagacctacggccttgatcaagttccgccgagcggcttgttacattgcggcagctatgatatttctgcgaaaatactcttttgaagtcagaactcacatttcaacatgtcaagcctagactactcgcactggggaacatgcccgggcctaatctttgtctactctcatttgaactacctgatccacaatgaatctggacatgttgtacgttgtcggtccaggacatggcgcaccggcaatacgccgcgctatggttggagggttcgctggagaaattctatccccactattcgcgagacgaagggcctacacagattgatctcgacctttagtaccacaggtggttttcccagccacaaattccgagacccccggtgcaatccatgaaggtggagaactgggttacgctctggcagtcctttggcgctgtcatggataaccccgatctgattgtgacttgtattgtgggggacggaggctgaaagcggtcccactgctacgtcctggcatgcgatcaagtacattgatccaagagtccggtgcagttttaccaattctgcatttgaatggattcaagatcagcgagcgcaatcttcgggtgcatggaccacaaagagcttttgactctcttcagtggatacgggtaccgttcgctttgtcgaggataacaacgatattgatgcggatttacacacctctatgatctgccgtcaatgaaatccagaagatccagaaggctgcccgttcagggaagccgattatgaccaaggtggccgatgctgattctgcgtacttccaagggctggactgggcccaagcagccatggcaagtttcttgagggctcataccattctcaccaggtgccattgcccaaagcaaaccgacaaggaacaactagatctgctgcagaattggctgtctagttataagccagaagctgttcacttcgaacggtgatgtaattgatgagatcaagtctgtgatacccacagaagaaaaagaagcttggccagcgcatcgaagtctacaatagttatacaccaccgaatctgcgattggaagcccttctgcgcggataaaggctctcaagaaagcgctatgaaagcggctgaccttcattaatcagacattcaaggacaacccgaacagcgtgcgactcttctcgccgggagttggaaagcaacaaactcgatgcggtatttgaatacacaaaccgcaatttccaatgacgagttcgccaatgcccgcggcggccgtgtaattgaagtccttagcgaacatatgtcaaggattcatgcagggctataccttgaccgggcgcattggtattttcccgtcctatgagcttcctcggcatcattcatacgatgatggtgcagtatgccaagttcatcaagatggctggaaacaacttggcactccggcgtcagtagtgtgaactacatcgaatcgagcacctgcacgccaagaacacaacggcttctctcaccagaacccatccttcatcggcgctgtgcaagctgaagcctagtgcagctcgggtatacttaccaccagatgcgaatactttcctgaaccatccaccattgtttaaaatcaaagaattacatcaacctaatggtaggctcaaagcccaactccagtgtacctgactcccaaagaggcggaaagccactgtcgcgcaggagcatatttggaagttctgcagcacggacgatggaattaatccggatgtcgtgctggtcggtaggtgttgaggtgatgttcgaagtaattgcggcagcggcgcttctgcgtaagctcatccgagcttcgtgtttgtgtcattaacgtgacggacctgatgattcttgataacgagggtgcatccgcatgccctgtccactgaggcattcgatggtctctttacttccgacaggcccacacttcaattaccacggctatccaactgagctgcagggtttgctctttggacgtcccccttgatcgcgtcagtgtcgccggctatatcgaagagggtagcaccaccacgcctttcgatgatgcttgtcaaccgtgtctcgcgtttccatgtcgcccagcatgctattcgtggtggccaaagtaaatgagaaggtcagggtgtatcagcaggagctgaatgctcagcttgaggagtatggtcagcacgaggaagtatattgtggaaaaccgggatgaccccgacggcatttgacatgccacaattccacagcttccacaaaccggctgagtctgagacattctggaatagcccagtag

SEQ ID NO: 166 - protein, 822 aa, Penicillium chrysogenum
MPAEVISEPNPQALPSHLPDYLEKLSVSLEREKLDEKTYDALIKFRRAACYIAAAMIFLQENTLLKSELTFQHVKPRLLGHWGTCPGLIFVYSHLNYLIRTMNLDMLYVVGPGHGAPAILAALWLEGSLEKFYPHYSRDEKGLHRLISTFSTTGGFPSHINSETPGAIHEGGELGYALAVSFGAVMDNPDLIVTCIVGDGEAESGPTATSWHAIKYIDPKESGAVLPILHLNGFKISERTIFGCMDHKELLTLFSGYGYQVRFVEDNNDIDADLHTSMIWAVNEIQKIQKAARSGKPIMKPRWPMLILRTSKGWTGPKQLHGKFLEGSYHSHQVPLPKAKTDKEQLDLLQNWLSSYKPEELFTSNGDVIDEIKSVIPTEDKKKLGQRIEVYNSYTPPNLPDWKPFCADKGSQESAMKAAGTFINQTFKDNPNSVRLFSPDELESNKLDAVFEYTNRNFQWDEFANARGGRVIEVLSEHMCQGFMQGYTLTGRIGIFPSYESFLGIIHTMMVQYAKFIKMGLETTWHSGVSSVNYIESSTWARQEHNGFSHQNPSFIGAVLKLKPSAARVYLPPDANTFLTTIHHCLKSKNYINLMVGSKQPTPVYLTPKEAESHCRAGASIWKFCSTDDGINPDVVLVGIGVEVMFEVIAAAALLRKLIPELRVCVINVTDLMILDNEGAHPHALSTEAFDGLFTSDRPIHFNYHGYPTELQGLLFGRPRLDRVSVAGYIEEGSTTTPFDMMLVNRVSRFHVAQHAIRGAAKVNEKVRVYQQELNAQLEASMVSTRKYIVENRDDPDGIYDMPQFHSFHKPAESETFWNIAQ

SEQ ID NO: 167 - DNA, 2341 bp, Aspergillus nidulans; identical to SEQ ID NO: 143

SEQ ID NO: 168 - protein, 780 aa, Aspergillus nidulans
MPGEVIERPNPAPKPSHVPDLVEKLIIPAQKTKLEKSDCDALHKYRRAAAYIAAGHWGTCPGLILVYSHLNYLIKKQNLDMLYVVGPGHGAPGLLASLWLEGSLGKFYPQYTKDKEGLHNLISTFSTSAGLPSHINAETPGAIHEGGELGYALSVSFGAVMDNPDLIVTCVVGDGEAETGPTATSWHAIKYIDPAESGAVLPILHVNGFKISERTIFGCMDNREIVCLFTGYGYQVRIVEDLEDIDNDLHSAMSWAVEEIRNIQKAARSGKPIMKPQWPMIVLRTPKGWSGPKELHGQFIEGSFHSHQVPLPNAKKDDEELQALQKWLSSYKPDELFTESGDVIDEILSIIPSDDKKLGMRPEAYKTHLPPDLPDWRQFCVKKGDQFSAMKAIGSFIDQVFVKNPHTVRLFSPDELESNKLSAALSHTGRNFQWDEFSNAKGGRVIEVLSEHLCQGFMQGYTLTGRTGIFPSYESFLGIIHTMMVQYAKFAKMAKETAWHHDVSSINYIETSTWARQEHNGFSHQNPSFIGAVLKLKPYAARVYLPPDANTFLTTLHHCLKSKNYINLMVGSKQPTPVYLSPEEAESHCRAGASIFKFCSTDGGLRPDVVLVGIGVEVMFEVIKAAAILRERCPELRVRVVNVTDLFILENEGAHPHALKHEAFDNLFTEDRSIHFNYHGYVNELQGLLFGRPRLDRATIKGYKEEGSTTTPFDMMLVNEVSRYHVAKAAVTGGARFNEKVKLRHQELCSEFDHNIAETRKYIMNNHQDPEDTYNMPSFN

SEQ ID NO: 169 - DNA, 2341 bp, Aspergillus clavatus
atgcctggggaagtcattgacagaccaaacccgcaggcgctgccttcccatattcccggtggttgaacagttgcaggtgaagctggatttgacgagtttagagcaaccggcctgcggccttgttcaaattccgtcgagctgcttcatacatcgctgcagcaatgatctttctgcgataatgtgctactgaaaagaagcttgacgcatgacgacataaagcctagattgcttgcattggggaacatgtcccggcctgatattggtatactctcacctgaattacctcattaaagcgcaatctcaatatgctgtatgtcgtgggaccaggacatggtgcaccagccatccgcctctctctggctggagggctcgttggagaagttctacccagagtattcgcgaaatggagggcctcgccaatctcatctcgactttcagtacaacagccgggctgcctagccataaatgcggaaacaccaggtgctatccacgaaggaggggaactgggatacgcacttgctgtcatttggtgcagttatggacaaccccaatctgatcgttccatgcattgtgggcgatggaagcagaaactggcccaacagcagcatcttggcacggcatcaaatatatcgatcctggagtcaggcgctgtgctgccaatcctgcacctgaacggattcaagatcagcgagcgcaatctttggctgcatggacgacaaggagctgacctcgcttttcactgggtatgggtaccgtccggattgtgcaggatttgaatgacatcgacaccgatctccatcgatctatgacctgctttggaagaaatccacaagattcagcaagcagcgcgatccggaaagcccattatgaccaagatggccaatgctgattttgcgcacaccaaagggatggtcaggcccaaaggaaacatggccagttcattgagggctcattccattcacatcaagtccccctgcccaacgcaaaaggacaaggaagagctgcaggccctcgagaaatggctttcctcgtatgggcccagagcttttcactgagaatggagatgttatagatgagattaaatccatcatccctacggatggcgatgaagcttggtcagcgtgtggaggcatacaaggcttatctgccaccaaagctccgactggaggaagttcgccgtggataaaggtagccaacagagcccgatgaaaacgaccgaagcttatcgacgaggtcttccaactcaaccctcacactgttcgattgttttcaccgggaattggagagcaacaaactgagcgccgctctggatcacactgggagaaatttccagtgatcagttctctagcgcgaaaggtggccgggtcatcgaagtcctgagcgaacatatgtcagggttttatccagggttacacgttgaccggacgcacgggtatcttcccatcgtatgagcttcttgggaatcgttcataccatgatggtgcagtactccaaattcatcaaaatggcaagagaccacatggcaccgtagcatagccagcatcaattatattgagacaagcacgtacacggcaggagcataatggattttcacaccagaatccatctttcatcggggcagtacaaattgaagcccacggctgctcgggtttatctgccgccggatgctaacactttcttaaactctccatcactgcttgaagtcgacgaactacatcaatctcatggttagttcgaagccccactccggtgtatttgaccccagaagaggcagagagccactgcagagcaggtgcatgtctggaaattctgcagcaccgacgatggtctggacccagacgtagtattggttggaaggcgtcgaggtgatgtttgaagtcattgctgctgccgccattctgcgcaaacgttgccgagcttcgcgtacgggtggttaacgtcaccgatttgatgatcttggagaacgaaggcgcacccgcatgcgctcaccaccgacgcgtttgatagcctgtttacatctgacagacccacatttcaactaccacggatatccgactgagttgcagggcttgctgttcggacggccacctggagcgcgctaccatcggcggatacatggaggagggaagcaccacgacaccatttgatgatgcttgtcaaccgcgtttcacgcttccatgtagcacaagcggccatttgtggggtcaaagagaaatgaaagagttcagatccgacaacaggagctgtacacggagttggaccaatatggtagagaccaagaagtacatcctcaaaaaccgaaaggatcccgatgatatgtgatatgccgaaattcgaataa

SEQ ID NO: 170 - protein, 806 aa, Aspergillus clavatus
MPGEVIDRPNPQALPSHIPDVVEQLQVKLDLTSLEQPACDALFKFRRAASYIAAAMIFLQDNVLLKRSLTHDDIKPRLLGHWGTCPGLILVYSHLNYLITKRNLNMLYVVGPGHGAPAILASLWLEGSLEKFYPEYSRNAEGLANLISTFSTTAGLPSHINAETPGAIHEGGELGYALAVSFGAVMDNPNLIVPCIVGDGEAETGPTAASWHGIKYIDPAESGAVLPILHLNGFKISERTIFGCMDDKELTSLFTGYGYQVRIVQDLNDIDTDLHRSMTWALEEIHKIQQAARSGKPIMKPRWPMLILRTPKGWSGPKEIHGQFIEGSFHSHQVPLPNAKKDKEELQALEKWLSSYGPRELFTENGDVIDEIKSIIPTDDAMKLGQRVEAYKAYLPPKLPDWRKFAVDKGSQQSPMKTTGKLIDEVFQLNPHTVRLFSPDELESNKLSAALDHTGRNFQWDQFSSAKGGRVIEVLSEHMCQGFIQGYTLTGRTGIFPSYESFLGIVHTMMVQYSKFIKMAQETTWHRSIASINYIETSTWTRQEHNGFSHQNPSFIGAVLKLKPTAARVYLPPDANTFLITLHHCLKSTNYINLMVSSKQPTPVYLTPEEAESHCRAGASVWKFCSTDDGLDPDVVLVGIGVEVMFEVIAAAAILRKRCPELRVRVVNVTDLMILENEGAHPHALTTDAFDSLFTSDRPIHFNYHGYPTELQGLLFGRPRLERATIGGYMEEGSTTTPFDMMLVNRVSRFHVAQAAICGASKRNERVQIRQQELYTELDHNMVETKKYILKNRKDPDDMYDMPKFE

SEQ ID NO: 171 - DNA, 2289 bp, Leuconostoc mesenteroides
atgaatatcgattcaacagattacctgaacaatttagatgcctactggcgagctaccatatttgtcagttggacaactctatttgttagataacccattgcttaaggaaaagttaagcagaacaagttaaaattcacccaatcgggcactggggcacgattcctagtcaaaactatttatgcccatttaaatcgtgctattaataaatttaatttgaatatgttttacattggggcctggccatggcggacaagtaatgatttcaaatgcttatcttgatggtagttatagaagcatttccagaaatcacacaggatgaagcgggtatgcagaaaatgtttaagcgtttctttccccggtggcgttgcttcacatgctgatcctaaagtacctggatcgattcatgggtggtgctttaggctattctatcttgcacggtgctggtgctgtattggataatccagctcattgctgcggttgttgttggcgatggtgaagcagaaacagcacccctagccactttggcatgttaataaatttttgaatcctaaaaatgatggtactgtattaccaattttgattaaatggcttcaagattgcgaatcccacagttctctctcgagaatctgatgaaacacaccgattatttccacagtctgggatggcacccttactttgtaagttcttttgacaaacattatgcaagttcatgaagaaatggcaaaaaccatggacacagtatttactgagattagacattagagaaaaagccgttcagcagacaaatgaagagattacacgaccactttggcatgattgttttacgttcacctaaaggctggacagggccaaaaacttgggatgacaaacattgaaaattcatttcgtgcacaccaaattccaattcctgctgaccaaaatcatcctgtatataccacaacttgttgattggttacaatcttacaaaccagatgaattatttgatgaacggtcagttaacacaatctatccaagaagtattaccgaaaaaagagctacgtatggaataattcggtcaccaatgctggtattatcaaacctttgattttacctgacattgacatacttggtagaaaataatcagccagacaataacttagctcaagatgctattttgttaggactatttgcgtgatatcatcaaacttaatcctactaacttccgtggctttggcccaggaaacagcttctaatcgtttccaagacatttttgaaacaactaatcgccaatggctatccaatcaaagaacctaatgatcaattcatggcacctgaaggccgtattattgattctattatcagagcattatgatgaggggatgcttgaagcttatacgctaaccggtcgtcatgttctttgccagttatgaggtctttattcgtgaagttgatgacatgattgtgcaacattaagtggttgaatcattctcatgacgtttcatggcgtaaggacgtaccggcattaaataattgctgattcaaccgttttccaacaagaccataatggttactcacaccaagatcctggtaacaacaatgttgtatgaaaagcaaccagacttcattcgcgagttcttcccagcgggctaatagcttggtcgcaacatttgaacatgctgcgcaagcaacgcaacagattaattattgtggccagcaaacatccccgcttacagtggttctcacctactgaggccaaacagcgttacgcagggattacgtgtcattgattgggcaagtactgacaaaggtgaaaaacctgattattattacttcagctggttctgaaccaacgacagaaagtttagcagcaatacaaattgcacgaacacataccatcattaaaaatacgttacatcaatgtattggatctatttactacgggccgatgccagctatggcttaagtgatgatgaatttgatgcttacttcactagacacaccagtattatttgcattccatggctatgaaccaatgattgaatctattttctaaacgacacaatcaccacttagcagttcatggttaccgagaagttggtgacattacaaccatttgatatgcgtgttcttaacaaaattgatcgatttaatttagttaaagctgctaaatctcttgccagaaaatattcgcaccaagcaagcagccctcgtgcaagaaatgaccgaagctcgacctacacgttgcgtatactaggtcaaagggaacggacttgcccgaagtaggattggcgctggcgaccacttaagtga

SEQ ID NO: 172 - protein, 788 aa, Leuconostoc mesenteroides
MNIDSTDYLNNLDAYWRATNYLSVGQLYLLDNPLLKEKLTAEQVKIHPIGHWGTIPSQNFIYAHLNRAINKFNLNMFYIEGPGHGGQVMISNAYLDGSYTEAFPEITQDEAGMQKMFKRFSFPGGVASHADPKVPGSIHEGGALGYSILHGAGAVLDNPDLIAAVVVGDGEAETAPLATSWHVNKFLNPKNDGTVLPILNLNGFKIANPTVLSRESDETLTDYFHSLGWHPYFVSSFDKPIMQVHEEMAKTMDTVFTEIKDIREKAVQQTNEEITRPLWPMIVLRSPKGWTGPKTWDDKPIENSFRAHQIPIPADQNHPEYIPQLVDWLQSYKPDELFDENGQLTQSIQEVLPKKELRMANNSVTNAGIIKPLILPDIDNYLVENNQPDNNLAQDAILLGDYLRDIIKLNPTNFRGFGPDETASNRFQDIFETTNRQWLLPIKEPNDQFMAPEGRIIDSMLSEHYDEGMLEAYTLTGRHGFFASYEVFIREVDDMIVQHFKWLNHSHDVSWRKDVPALNIIADSTVFQQDHNGYSHQDPGVTTMLYEKQPDFIREFFPADANSLVATFEHAAQATQQINYIVASKHPRLQWFSPTEAKQLVTQGLRVIDWASTDKGEKPDIIITSAGSEPTTESLAAIQILHEHIPSLKIRYINVLDLFKLRADASYGLSDDEFDAYFTTDTPVLFAFHGYEPMIESIFFKRHNHHLAVHGYREVGDITTPFDMRVLNKIDRFNLVKAAINLLPENIRTKQAALVQEMTDKLDLHVAYTRSKGTDLPEVEDWRWRPLK

SEQ ID NO: 173 - DNA, 2307 bp, Oenococcus oeni
atgactattaattatgattcaaaggattatttgaaatatgttgatgcctattggcggggccaattatctttcagtcggtcaacttttcttgagaaacaatccgttacttaaagacgcttcagtccaaagacgttaagatcaagccgatcggtcattggggaacggttgcgccgcaattttatttatgctcatttaaatcgagcaattttaaaatacgatttaaatatgttttattgaaggctctggccatggtggccaggtgatggtttccaattcatatttggatgggttataccgaaacttatccaaaagtaactcaggatattcaaggaatgcaacgtttattcacaattctcttttcctggcggaattgcttcacatgctgctccggaaactcctggatcgacacgaaggaggagagctgggttattcgatttcgcatggagttggtgctattttggacacccgatgtgattgctgctgttgaaatcggggatggtgaatcagaaacggggcctttgggcatcgtggttttccgacaaattcattaatccgattcatgatggtgctgtgttgccgagttcagattaatggatttaaaatttccaatccaacaattctttctcgcatgagcgatcgatttgaccaattattatcatggaatgggttgggagcctttgttcgttgaaacggatgtcagataattttaaagtgcatgccgagatggccgatgctgttgataaggccattgaaaattaaagctattcaaaaaaacgcccgtaataataatgatgattcattgccaatctggcatgattgtattacgtgctcctaaaggttggacaggtccaaaaaaagatttggatggtaccgattgaaaattcatttcgggcacatcaggtgccgattccagtcgatgcaaatcattgaacataaagatatgctgattgattggatgaagtcctacaaaccggaagaattgttcagaggatggcagcttaaaagaaattgttaaggtaaatcagccaaaaggccaacggcgaagcaatgaacccaatcacgaatggtggaataaagccaaggacattgaatatgcctgatagaacgatttgcttttccgaaaaatagcttgaaaaacaataaaaaaccagggatggacccaggttgtttcaacatttattgccgaaataataaagaaaaatcctatcaatttccgtcttcggtcccgatgaaacaatgtccaatcgtctctgggacgagtttaaagtcactaatccagtggatgcaagcagtccatgaaccaaatgatcaatatatggctcattctggtcgtactagatgctcaattgtctgaacatcaggccgagggatggatggaaggatacgttttgaggccgacacgctttctttgcgtcctacgaagcctttacgcgtgtaattgattcgatgcactcaatattataagtggttgcgaaaagcggtcgagcaagattggcgtcacgattatctcgttaaatgtcattaatgcttcacatgcttttcaacaggaccataatggttatactccaagatcccggtatgcttactcatatggctgaaaaaggtcatgagtttgtcaatgaatttgccagccgatgctaattcccttttggcagttatgaataagtctctgcaggttagaaaaaattaacattattgtcgcttccaaacacccacgaactcaatggtttacgatcgacggccaaggaattggttgacaacggtttgggaattattccatgggcttccaacgatgacggtggaaccggacgttgtttttgcagccggtggaacggaagcgactatggaaagtttgggctatttcgctcttgcatgaaagcttccctgaattgaagttccgctttattaatgtaagatttgttgaaactgcgcaaaaaaggggataacgatgattatcgcggtctaagcgattgaattcgaccattactttacgcgtgaaaaaccagtagtcttttccttccacggctttgagtttggcacgcgacttgttctatgaccgccacaatcataatgttatttttcatggatcgtgaaaacggagacattacaactccgttcgatatgcgtgtcctgaatcatcttgatcttccaccttgccaaagacgcaatcaacgcaactaagtacgctgatgtggctggccaatgaccaacgaatggatgatatgttggccaaacataccgcttatatttgcgatcagggaagacctgcctgaagtaacctcttggcagtggcaggatattaaataa

SEQ ID NO: 174 - protein, 794 aa, Oenococcus oeni
MTINYDSKDYLKYVDAYWRAANYLSVGQLFLRNNPLLKDELQSKDVKIKPIGHWGTVAPQNFIYAHLNRAILKYDLNMFYIEGSGHGGQVMVSNSYLDGSYTETYPKVTQDIQGMQRLFKQFSFPGGIASHAAPETPGSIHEGGELGYSISHGVGAILDNPDVIAAVEIGDGESETGPLAASWFSDKFINPIHDGAVLPIVQINGFKISNPTILSRMSDRDLTNYYHGMGWEPLFVETDGSDNFKVHAEMADAVDKAIEKIKAIQKNARNNNDDSLPIWPMIVLRAPKGWTGPKKDLDGNPIENSFRAHQVPIPVDANHLEHKDMLIDWMKSYKPEELFNEDGSLKEIVKVNQPKGQRRMAMNPITNGGIKPRTLNMPDMERFAFPKNSLKNNKKPGMDLQVVSTFIAEIIKKNPINFRQFGPDETMSNRLWDEFKVTNRQWMQAVHEPNDQYMAHSGRILDAQLSEHQAEGWMEGYVLTGRHAFFASYEAFTRVIDSMLTQYYKWLRKAVEQDWRHDYPSLNVINASHAFQQDHNGYTHQDPGMLTHMAEKGHEFVNEFLPADANSLLAVMNKSLQVRNKINIIVASKHPRTQWFTIDEAKELVDNGLGIIPWASNDDGVEPDVVFAAGGTEATMESLAAISLLHESFPELKFRFINVIDLLKLRKKGDNDDYRGLSDLEFDHYFTREKPVVFSFHGFESLARDLFYDRHNHNVIFHGYRENGDITTPFDMRVLNHLDRFHLAKDAINATKYADVAGQFDQRMDDMLAKHTAYICDQGTDLPEVTSWQWQDIK

SEQ ID NO: 175 - DNA, 1071 bp, Neosartorya fischeri
atgagagctttgtctgttttttttgctttgttctgtttcttggctttatcttctgcttccaggtcaagatgttgttaaaagagttacttctggttctttgcaacaagttactaattggttctaatccatctggtactttgatgtacatttacgttccaaagaatttggctactaccaggtattgttgttgctattcattattgtactggtactgctcaagcttattatactgtctccatatgctcaattggctgaacaatacggttttattgttatctatccacaatctctattctggtacttgttgggatgtttcttctcaatctgctttaactcataatggtggtggattctaattctattgctaacatggttacttggactatttctcaatacaatgctgatatctaaggtttttgttactggttcttcttctggtgctatgatgactaatgttatggctgacttatccagaattgtttgctgctgctactgtttattctggtgtttctgctggttgtttactcttcatctaaccaagttgatgcttggaactcttcttgtgctcaaggtaatgttatctactccagaagtttggggaggtattgctaaagcaatgtatccaggttatactggtcagaccaagaatgcaaatttatcatggttctactgatactactttgtacccacaaaatttacgaaacttgtaaacaatgggctggtgtttttggttacaattacaactctccacaatactcaatctaatactccacaagctaattaccaaactactatttggggtccaaatttgcggtatttttgctactggtgttggtcatactgttccaattcatggtgaacaagatatggtggtttggttttgcaggtggttcttctactactactacacaaccaactactacttctaacaacatcttctggtggttcttcaactggtactggtgttgctgctcattggggtcaatggtggtaatggttggactggtccaactgtttgtgcttctggttatacttgtactgttgaatgcttggtattctcaatgcttataa

SEQ ID NO: 176 - protein, 368 aa, Neosartorya fischeri
MRALSVFFALFCFLALSSASPGQDVVKRVTSGSLQQVTNFGSNPSGTLMYIYVPKNLATKPGIVVAIHYCTGTAQAYYTGSPYAQLAEQYGFIVIYPQSPYSGTCWDVSSQSALTHNGGGDSNSIANMVTWTISQYNADTSKVFVTGSSSGAMMTNVMAATYPELFAAATVYSGVSAGCFYSSSNQVDAWNSSCAQGNVISTPEVWGGIAKAMYPGYTGPRPRMQIYHGSTDTTLYPQNYYETCKQWAGVFGYNYNSPQSTQSNTPQANYQTTIWGPNLQGIFATGVGHTVPIHGEQDMEWFGFAGGSSTTTTQPTTTSTTTSSGGSSTGTGVAAHWGQCGGNGWTGPTVCASGYTCTVVNAWYSQCL

SEQ ID NO: 177 - DNA, 1065 bp, Pyrenophora tritici-repentis
atgttgttgcaagcttttttgtttttgttggctggttttgctgctaaaatttctgctccatcaccaccaccacccaccttctccaccttctgatgatgatgacaaatccgttgctgtatgatccaccagttattaacactttccatcaatgtgatccagctgctcatgtttggacatgatccaaatactgtttacgtttacggttctcatgatgttaattctactaagaatcccagttcaatatgatatgaaggattactacgttttgattcaagttgatattactaaacgctactgttggtccaaagattttggatttgccagatattccatgggcttctcaacaattgggctccagatgttgctgaaaaaaatggtgaatacttcttgtattttccagctaaagaaggatggtgtttttagaattggtgttgctaaatctgataaaccagacggtaaattcagctgaaccatcttatattccaggtgcttattctattgatccagctattttggctgatggatggttgttactacatgtattttggtggtttgtggggtggtcaattgcaagcttggcaacaatactttgaatacttctgctttcggtaatatttctccatcttctggtccagcttggtccaagatttgctaaattgtctgctaatatgacacatttggctactgaaccaaaagttggttatctacgataaagatggtcaagttatgcaagctaattctactagaagatactgaagctccatctattaacaaagttggtaacttgtattacttgcaatattctactggtatctcatactattgaaattgctgttggtaaaaaaccagaaggtccattttattggaaataccttgttgcaaccagttaaaggttggactactcatgaatctattgttaagtttaagggattggttgttgtattatgctgatgcttctttgactggtattgatgatttgagaaacaaaggttagaaagttgaattttgctaatggtacttttgctttggctcaaccacaaccatactccatttccatcttcataa

SEQ ID NO: 178 - protein, 366 aa, Pyrenophora tritici-repentis
MLLQAFLFLLAGFAAKISAHHHHHHPPSPPSDDDDKSVAVYDPPVINTFHQCDPAAHVWKHDPNTVYVYGSHDVNSTKNPPVQYDMKDYYVLIQVDITKPATVGPKILDLPDIPWASQQLWAPDVAEKNGEYFLYFPAKDKDGVFRIGVAKSDKPDGKFKAEPSYIPGAYSIDPAILADDDGCYYMYFGGLWGGQLQAWPNNTLNTSAFGNISPSSGPALGPRFAKLSANMTHLATEPKELVIYDKDGQVMQANSTRRYFEAPSINKVGNLYYLQYSTGTSHTIEIAVGKKPEGPFYWKSTLLQPVKGWTTHESIVKFKGDWLLYYADASLTGIDDLRNTKVRKLNFANGTFALAQPQPYTPFPSS

SEQ ID NO: 179 - DNA, 952 bp, Aspergillus niger
atggttcagatcaaggtagctgcactggcgatgcttttcgctagccaggtactttctgcccattgaaccccgtcaggcttcagtgagtattgataccaaattcaaggctcacgggaaaatatcttggaaacattggtgatcagtacaccttgaccaagaactcgaagactccggattatcaaggccgattttggcgcgttgactccagagaacagcatgaagtgggatgctagaacccagccgtggacagttctctttctcaggatcggactacctggtcaactttgccctctaacaacaagctgatccgcggacatactctcgtgtggcactcgcagctcccctcctgtccaatccatcacggacaagaatacactgatcgaagtcatgaagaatcacatcaccagtgatgcaacactataagggcaagatttatgcctgggatgttgtcaatgaaatcttcagaagacggctccctacgcgacagcgtcttttacaaggtcatcggcgaggactacgtgcatcgccttcgagactgctcgggctgcagatcccaatgcaaagctctacatcaatgattaacctggattccgcctcctaccctaaattgaccggcatggttagccatgtcaagaagtatcgcagctggcatccctatcgatggaatcggttcccaaacccacttgagcgctggtgggtgctggaatttctggagctctcaatgctctcgcaggtgccggcaccaaggagattggtcaccgagcttgacatcgctggcgccagctcgaccgactacgtggaggtcgtcgaagtgcctgaaccagcccaagtgtatcggtatcaccgtttggggagttgctgacccggatttggcgctccagctccactcctctgctgttcgacagcaactacaacccgaagcctgcatactgctatcgcaaatgctctctag

SEQ ID NO: 180 - protein, 327 aa, Aspergillus niger [sequence omitted]

SEQ ID NO: 181 - DNA, 1071 bp, Aspergillus fumigatus
atgcatcggtggcaattgcttctagggcttgtttttgcaatcgaagcagcttcagctcccaagatcatggggtcctagaaagttcacaagtctggtttccttcggtgactcctacagatcagtcaagactaaactactttggttctcataacggatctgcgccaccaataggctgagcaaccagactctaacaatacagcatctgggggatacgtgtggggacattatgtcacagtacgctgacgtgaacttatacaattatgccgtgtctggcgcagtatgctctaatgatcacacctagaacttttagttcaatcaatgctcctttcccatctgtactggaatatggttagcgcatttttggctgattcaaaacacaaagtttccggtaagagatttttacacaccaccaagggagactgtctactctatatggattggcactaatgacctcggcaactacgttcattacagattcccaagtcaaggataaaaccatccctgattacattaactgtgttttcagttttagacagagtttatgtgtctggtggtagatactttgtactcatgaatctggccattgcaattagctcctttgtacgcaactccagaaaatggtggggtaggcgctaatctactggccagacaaaccagataacttaactctaacttcatatagaatgtgggaacaaggcgactgtgaaccatgtttttcaataccaaaccccttacgaacttttggtcgctagaatacccaggtgctcgttttgccgtcatggacatgtatggtttgttgtctgaagtctactaatccaacaaaatacttcaatggaagcgcacaggccaatgtaacagggtttaacaatctgtaccttagatggcggtcaatgtacaagactaccaagtcctgattcattcatgtggtgatgaacttcatccatcccaacgaacagatcaaatcattgccgaagagtttgttaagggtaggaggagattcaaagtgggccacgtattgggatgatgatgacaaaggtggttctcccttctcatcatcaccaccaccactaa

SEQ ID NO: 182 - protein, 368 aa, Aspergillus fumigatus
MHRWQLLLGLVFAIEAASAHPRSWGPRKFTSLVSFGDSYTDQSRLNYFGSHNGSAPPIGWEQPDSNNTASGGYVWGHYVSQYADVNLYNYAVSGAVCSNEITPRTFSSINAPFPSVLEYEVSAFLADSKHKVSGKRFLHIPPRETVYSIWIGTNDLGNYAFITDSQVKDKTIPDYINCVYSVLDRVYVSGGRYFVLMNLAPLQLAPLYATPENGGVGANHYWPDKPDNLTLTSYRMWEQVATVNHVFQYQTPYELLVARRYPGARFAVMDMYGLLSEVYYNPTKYFNGSAQANVTGFNNHCTLDGGQCTRLPSPDSFMWFDELHPSQRTDQIIAEEFVKVVGGDSKWATYWDDDDKGGSPPSHHHHHH

SEQ ID NO: 183 - DNA, 2945 bp, Aspergillus oryzae
atgaagctgatttggcctacgtctcttctctttacggccctggtggcagccgaaccttttgttattttcatctggcacctctgaataccaacttgcgtctaatactactgcaccaggtttgggtagcgcaaaatgaaccagtaggcgtattaagagctgctcacgatctagccagattttggtagagttttgggtgtcaatggtactgttaatgttttcgacactgatatttgagtcaccaggtaaagcagtaatcatcactggcacagtgggtcaatccacgccaatcgcaacttgtttccgatgggaaactcgatgtgtccctgatagaaggaaagtgggaaagttgtgtctcgtatcgttgaaaatccatttccaaacgtgacatggtcactcgttgtagctgtctgacagaagaggtacaatctacggcttgtacgatataagtgagcaaatgggtgtctccttggtactggtgggcagacgtccctgttaagaccaaaacaggaatatgggtcgctcgaaggaactttccaaaagtcaccatctgtgaagtatagaggtttcttcatcaatgatgagtcctgcattgtcaggatgggtggccgagaatttcggtaccaagtttaactctgccttatagacatatctttgaattatgtttgagactgaagggaaactacctgtggccagctatgggggaaaatgttttatgtcgatgatgtcgataatggccaactcgcccatgaatacgatcattatgggtacaagtcatcatgaaccaatggcacgatcagaacaggagcagaaaatacctggatggtgaatggaattggaacgaaaatcaagccaacattacaacatttttcccaaggcattgatagagccaaacattgggatacaatatggactatgggaatgagaggtgggtgacgtggcttctcctacgttgactgctgccgatctggaagagttgattcacgcaccaaaaattgttggtcgaatcattcaacgcctccgatcctgcaagtattccacaaacatgtcctatacaaagaggtttcagactactacgccgctggcatggaagtccctgagtcagacactactttggacagatgataattcaggtaatctcatcagagttccaatagctaatgacatctagagttgcaggtgctggcgtatactaccactttgactacgttggttccccaatcttacaaatggataaactcaatacaattggttaagacctgggagcaaatgcatctagtaccaaaaatcagcaagacaaatctggattgcaaacgtgggggacatcaaaggtcttggtcccactcactcactttatggacatggcctatgacatggataggtttacgtctacagtcaacaacaaaatggttgaagcgttgggcagcgagagagtttaacgaaaggattgccgagaacagctgatatcttaaaccactatggcacattagttgccagacgtaagtacgagcttgtcacaactgccattcgctttctctactatctactatgacgaagcagaggcgaatcgctcaatgggagagtttacttgcccaaacacaatcagtctattcaagtttagatcaagaccagaaccccatttttcgaaatgtttttacatcctgtcctagcgggtaaaactgtaggatctgtatacaaaaacagcttttaatgcactctaccatcaacaaggtagaatatctaaacagattagctcagaaggttcatgacttgtttacagaggacagtgccattacggaaataccacggggtgaaaggagggaaatggaggcctgtcatggatcaggttcacatcggcttcaagctgggatgatccagttgataatacaaatgtaatgccagctctatcttacatcggctccacaaggagcgggtggaataggcattgcagttcagggttcagcagcttcctaccgagcaaaagacactaagacttttgtctatggacccttacatgccacctagtgaatccatacattgatatctttgcaaggaaaaatacaacggtgacgtattcaattagctccaataagctacgtgacagtatctaacgcttcaggcagtgtctctgcaagcagcaatatcagcggttagatccaccatcactgtagactgggcatccgcagaacctggactttcccataccgctccaagtgagagccggagatggcttcactgctgctctagtacttccagtcaataatatttgtcccaactaactttactggttttgtcgagtccaatggagttatctccatcgaagtcacattatacatccgctgaaacaaaatctaatgtatcatacgttgaaatccctcattggtagaacattatcagcagttatgccttggccagttactatggggacacagcatcctaactggaccagctttaagatactcattgtacactactacagcttctccaagcgctaggtattatctccttgggagcatcacataaccatgatccaactagattgattaagttcgctttcattagacgggtctgttcctgttactgttcgaccagtctcaactgtaccaccatacagaaggtcaggcttggcagcaggccgttatagaaaacggttggacctctgttattgaacccaggtgaagtgggtactggagagcatgaattatctttatggttgcttgaacctggaggtattacaaaagattgttttggacatgggagggtatcaagattctgcattagggagtcgaacgtgctgtggttaccgaagctgacgtattgagagcggaagtcgttgaggaaggcagatatctcaccattgtctagagtctggagattgccatcttctcatgacttagatgatggacaaaggtggttctcctccttctcatcatcaccaccaccactaa

SEQ ID NO: 184 - protein, 998 aa, Aspergillus oryzae
MKLIWPTSLLFTALVAAEPYLLFSSGTSEYQLASNTTAPAVWVAQNEPVGVLRAAHDLANDFGRVLGVNGTVNVFDTDISESPGKAVIITGTVGQSTPIDQLVSDGKLDVSLIEGKWESYVSRIVENPFPNVTWSLVVAGSDRRGTIYGLYDISEQMGVSPWYWWADVPVKTKTGIWVAPEGTFQKSPSVKYRGFFINDESPALSGWVAENFGTKFNSAFYRHIFELCLRLKGNYLWPAMWGKMFYVDDVDNGQLAHEYGIIMGTSHHEPMARSEQEQKTYLDGEWNWNENQANITTFFQQGIDRAKHWDTIWTMGMRGEGDVASPTLTAADLEELIHAQQKLLVESFNASDPASIPQTWVLYKEVSDYYAAGMEVPESVTLLWTDDNSGNLIRVPIANETSRVAGAGVYYHFDYVGSPRSYKWINSIQLVKTWEQMHLAYQKSARQIWIANVGDIKGLEVPLTHFMDMAYDMDRFTSTDSTTKWLKRWAAREFNERIADRTADILNHYGTLVARRKYELLSQLPFAFSTIYYDEAEANLAQWESLLAQTQSVYSSLDQATRTPFFEMFLHPVLAGKTVVDLYTKTAFNALYHQQGRISTNRLAQKVHDLFTEDSAITERYHGVKGGKWRPVMDQVHIGYSSWDDPVDNTNVMPALSYIAAPQGAGGIGIAVQGSAASYPEQKTLRLLSMDPYMPPSESRYIDIFARKNTTVTYSISSNTSYVTVSNASGSVSASSNISDVRSTITVDWASAEPGLSHTELQVRAGDGFTAALVLPVNNTFVPTNFTGFVESNGVISIEASHYTSAETKSNVSYVEIPHYGRTLSAVMPWPVTMGTQHPNTGPALRYSLYTTTASPSARLIISLGASHNHDPTRLIKFAYSLDGSVPVTVRPVSTVPPYKEGQAWQQAVIENGWTSVIELPGEVGTGEHELSLWLLEPGVVLQKIVLDMGGYQDSALGSPERAVVTEADVLRAEVVEEGSDISPLSRVWRLPHHHHHH

SEQ ID NO: 185 - DNA, 2921 bp, Aspergillus fumigatus
atgctactgtcagtacttctgactgtcagctgcgtggtaggagctgcacacgctctcgcaggaaactattgttgctttcgatcaaactaaaggcgcgtacaagttggcaggtaaaaacggcagcaggcgtcattttgttagatggagatgattggcctggtgttattagagcagggtgacttggctgttgatttcggaagagttacaggaactaactttacaacaggtttgaaatggaactactttacatgatcaatcaagcgtgagaggaaatagaggagtcattattgggcacagtgggtagatccagattaattgattcacttgctgctagaggcaaaatcgatgtctcaaaccaagggcaaatgggaagcatttcaaacagaagtggtatctaatccattagggtatcccaaatgctgttgtaatctccgggagtgacaagaggggagtaatctacggtctatgacatatctgagcaaattggcgtttctccttggtactggtttgcagatgttgctcgcacaacataaagaggtttacgctctgaaaaagaagaagatccaaggaccaccatctgaaatacagaggtatcttcattaacgatgaacagccagcgttgacgaactggattaacgaattacccaccagccagatatggtccaggtttcaacgcagatttttactctcgtgtttgaacttctgttaagattaagagcgaattacttatggccagctatgtggaataatgcgttaccctgacgaccctagaaatggtccaacagcagacgaatatggtatagtcatgggaatcacacacagaaccaatgatgagagccactaaagagcaatccctatttctagaaggagtgggattggacctccaatcagaaaaacattacacagtttttcaaggaaggtgcaattatcaaaagattgggaagtgctttggaccttgggcatgagaggtaagcacgatacggctacctactaatacaaaacaaactctgggagatatcgtcaacacacaacaacaaatactctgatgtcttaaacatgacaaacatcagttctattccacaaatgtggtgtctctataagggttggacaattttacgaggagggtttacgtgcccctgatgatgttactttgttgtggggatgacaattgggggaatatacagagactacctctcgggaatgaaaccgctcgttctgggtgcaggtgtgtactaccattttgattatgttggtgatcctagagattataagtggaaatactatctcattgcaaaagacatgggaacaaatgcatcttgcttacgaaagacaagagacaaatttggatagtcaatatcggggatctaaaaggtgtggagctaccattgaaccttcctggacctagcttacaatacacctttgtggtcatctccagattctaccctaacatctaaaccattgggccactagggaatttggaacccaagtatcttctaaagtagccgacaatggatcgttacgggatgtacgctgccagaaggaagtacgaactcatcgattcatctattcagtgtcatcaactataacgaagccgatagagtacaggaagagtggagagcattggaatgatgctcaaaatgtttaccaagagttgaaagactcagctaggccagcattctttgttagttttacaaccttgtatggcgggtcaaatagtgaccaacatccatatcacagtggagaaataacctgtacgctggccaacgtagaacgtcaactaacaccttggctgatcaagcttaaactgtttaatgacgaccatgccttgacacaaagatatcataagttgttagacgaaatggaatcatattatggatcaaacgcacctaggatacgattactggcagcagccaaagaaatacattgccaccactcgcatatactcaagtactggaggaatcattagctggctatgggtgtctcagtcgaagcatctaatgcctctgtgccaggtgacgatgtgtggcatactttctagtaactctctaactctaccaccaatggacccttacggcccatctacaagatatggacatatactccagaggtacccatgagttcactttcaccgtaagtccttatgacttgggtcaaagcaacaccatcctctggcaaaataagtgtgagtgggaataataccgatgagaatccatctcagtgttgattgggaaaaggttccaagtggctcacacatggccctgaaatgtcactatctcttcagatgattacgggaatttcggtatgccaactgtacaacttcgtaaacaaaactagcgttcctgccgactttcatggcttcgtggaatcagacggtacagtcaatagaagccgagcacgctactagaaacacatcaagcacagacgtaagttacgcagattcctagatacggccatacattgtccggtgttacactgttgccagtcacaattgagacagcaaccaccttcatcccctcgtttggaatacgacatgtatctgttttcaaatgtgaacagttaaggccactgtctacctaggcccatcccttaatactgatcactcaagaccacaaatatgctatttctatcaacgatgccgatcctcaggttgttcagtttgttccatctaccactcggctctttgccatctaactgggaaactactgtgagaaatgccgtttggacaaacaacatcccatgctatacaaggtggaggcaggaaaaatacccttaagttgtgggcaagaaccaggagtggtttttcagaaaattgttgttgaccttggcggagttagaccatcctttagggccaccagagtctatgatcgtagatgatgatgacaaaggtggttctcctccttcatcatcaccaccaccactaa

SEQ ID NO: 186 - protein, 1006 aa, Aspergillus fumigatus
MLLSVLLTVSCVVGAAHALGQETIVAFDQTKGAYKLAGKNTAAGVILLDGDDWPGVIRAAGDLAVDFGRVTGTNFTTGLINGTTLHDQSSVRGNRGVIIAGTVGRSRLIDSLAARGKIDVSQTKGKWEAFQTEVVSNPLEGIPNAVVISGSDKRGVIYGLYDISEQIGVSPWYWFADVAPAQHKEVYALKKKKIQGPPSVKYRGIFINDEQPALTNWINENYPPARYGPGFNADFYSRVFELLLRLRANYLWPAMWNNAFYPDDPRNGPTADEYGIVMGTSHTEPMMRATKEQSLFLEGEWDWTSNQKNITQFFKEGAIRSKDWEVLWTLGMRGKHDTANPTNTKQTLGDIVNTQQQILSDVLNMTNISSIPQMWCLYKEVGQFYEEGLRAPDDVTLLWADDNWGNIQRLPLGNETARSGGAGVYYHFDYVGDPRDYKWINTISLQKTWEQMHLAYERQARQIWIVNIGDLKGVELPLNHFLDLAYNTPLWSSPDSTLTWLNHWATREFGTQVSSKVADIMDRYGMYAARRKYELIDSSTFSVINYNEADRVQEEWRALVNDAQNVYQELKDSARPAFFELVLQPCMAGQIVTNIHITVARNNLYAGQRRTSTNTLADQALKLFNDDHALTQRYHKLLDGKWNHIMDQTHLGYDYWQQPMRNTLPPLAYTQVLEESLAGSMGVSVEASNASVPGDDVWHSLSSNSLTLPPMDPYGPSTRWMDIYSRGTHEFTFTVSPYDSWVKATPSSGKISVSGNNTDARIHLSVDWEKVPSGSHMALINVTISSDDYGNFGMPTVQLPVNKTSVPADFHGFVESDGTVSIEAEHATRNTSSTDVSYAVIPRYGHTLSGVTLLPVTIETQQPPSSPRLEYDMYLFSNVSTVKATVYLGPSLNTDHSRPLKYAISINDADPQVVQFVPSTPLGSLPSNWETTVRNAVWTNTTSHAIQGGGRKNTLKLWAIEPGVVFQKIVVDLGGVRPSYLGPPESMIVDDDDKGGSPPSHHHHHH

SEQ ID NO: 187 - DNA, 2597 bp, Saccharomycopsis fibuligera
atggtctccttcacctccctcctcgccggcgtcgccgccatctcgggcgtcttggccgcccgccgccgaggtcgaatccgtggctgtggagaagcgctcgcgagtcccaattcaaatatacccagtctccatcccagagagatgagagctcccaatgggtgagcccgcattattccaactccacaaggtggtaggctccaagacgtctggcaagaagcatatgctagagcaagccatcgttggccagatgactattgttgaaaaggtcaatttgaccactggtaccggttcaattagatccatgtgttggtaataccggttctgttccaagattcggcatcccaaacctgcctacaagatgggccattgggtgttcgattcgctgactttgttactggctatccatggtcttgctactggtgcaacgttcaataaggatttgtttcttcaaagaggtcaagctcggtcatgagttcaacagcaaaggtgtacatattgcgttgggccctgctgttggcccacggtgtcaaagccagaggtggcagaaatttcgaagcctttggttccgacccatatctccggtactgctgctgctgcaaccatcaaaggtctccaagagaataatgttatggcttgtgaagcactttattggtaacgaacaagaaaagtacagacagccagatgacataaaccctgaccaaccaaactactaaagaagctattagtgccaacattccagacagagccatgcatgttgtacttgtggccatttgccgattcggttcgagcaggtgttggttctgttatgtgcttataacagagtcaacaacacttacgcttgcgaaaactcttacatgatgaaccacttgcaaagaagagttgggttttcaaggctttgttgtttcggactggggtgcacaattaagtggtttatagcgctatctcgggcttagatatgtctatgcctggtgaagtgtatgggggataacaccggcacgtctttctggggtcaaaacttgacgaaagctatttacaatgagactgccgattgaaagattagatgatatggcaaccaggatcttggctgctttgtatgctaccaagtttcccaacagaagatcaccttccaaatttttcttcatggacaacgaaagaatatgaataaatattatgctgacaacactaccgagattgtcaaagtcaactacaatgtggacctcaaatgactttacggaggacacagctttgaaggttgctgaggaatctattgtgctttaaaaatgaaaacaacactttgccaatttctcccgaaaaggctaaaagattactattgtggtattgctgcaggccctgatccgataggttatcagtgtgaagatcaatcttgcacaaggcgctttgtttcaaggttggggttctggcagtgttggttctccaaaatatcaagtcaccatttgaggaaatttcttatcttgcaagaaaaaacaagatgcaatttgattatattcgagtcttacgacttagctcaagttactaaagtagcttccgatgctcatttgtctataggttgtctctgctgcaagcggtgagggttatataaccgttgacggtaaccaaggtgacaaaaaatctcactttgtggaacaacggtgataaattgattgaaacagttgctgaaaactgccaatactgttgttgttgttacttctactggtcaaattaattttgaaggctttgctgcacccaaatgttaccgcaattgtctgggccggcccattaggtgacagatccgggactgatcgccaatattctttttggtaaagcgaacccatcaggtcatcttccattcactattgaagactgacgatgattacattccaattgaaacctacagtccatcgagtggtgaacctggacaaccacttggttgaaaatgacttgcttgttgactatagatattttgaagagaagaattgagccaagatacgcatttggttatggcttgtcttacaatgagtatgaagttagcagcaaaggtctcggcagccaaaaaagttgatgaggagttgcctgaaccagctacctacttcggagtttagctatcaaaatgcaaaagacagcaaaaatccaagtgatgcttttgctcgcagatttaaacagagttaatgagtacctttatccatatttagatagcaatgttacctaaagacggaaactatgagtatcctgatggctacagcactgagcaaagaacaacacctacaacctgggggcggcttgggaggcaacgatgctttgtgggaggtcgcttataactccagataagtttgttccacagggtaactccactgataagtttgttccacagttgtatttgacaccctgaggatggcaagtttgaaacccctattcaattgagagggtttgaaaaggttgttgtccccgggtgagaagaagacagttgatttgaggcttttgagaagagatcttagtgtgggataccaccagacagtcttggatcgttgaatctggtacttatgaggccttaattggttgctgttaatgatatcaagacatctgtcctgtttactatttga

SEQ ID NO: 188 - protein, 894 aa, Saccharomycopsis fibuligera
MVSFTSLLAGVAAISGVLAAPAAEVESVAVEKRSRVPIQNYTQSPSQRDESSQWVSPHYYPTPQGGRLQDVWQEAYARAKAIVGQMTIVEKVNLTTGTGWQLDPCVGNTGSVPRFGIPNLCLQDGPLGVRFADFVTGYPSGLATGATFNKDLFLQRGQALGHEFNSKGVHIALGPAVGPLGVKARGGRNFEAFGSDPYLQGTAAAATIKGLQENNVMACVKHFIGNEQEKYRQPDDINPATNQTTKEAISANIPDRAMHALYLWPFADSVRAGVGSVMCSYNRVNNTYACENSYMMNHLLKEELGFQGFVVSDWGAQLSGVYSAISGLDMSMPGEVYGGWNTGTSFWGQNLTKAIYNETVPIERLDDMATRILAALYATNSFPTEDHLPNFSSWTTKEYGNKYYADNTTEIVKVNYNVDPSNDFTEDTALKVAEESIVLLKNENNTLPISPEKAKRLLLSGIAAGPDPIGYQCEDQSCTNGALFQGWGSGSVGSPKYQVTPFEEISYLARKNKMQFDYIRESYDLAQVTKVASDAHLSIVVVSAASGEGYITVDGNQGDRKNLTLWNNGDKLIETVAENCANTVVVVTSTGQINFEGFADHPNVTAIVWAGPLGDRSGTAIANILFGKANPSGHLPFTIAKTDDDYIPIETYSPSSGEPEDNHLVENDLLVDYRYFEEKNIEPRYAFGYGLSYNEYEVSNAKVSAAKKVDEELPEPATYLSEFSYQNAKDSKNPSDAFAPADLNRVNEYLYPYLDSNVTLKDGNYEYPDGYSTEQRTTPNQPGGGLGGNDALWEVAYNSTDKFVPQGNSTDKFVPQLYLKHPEDGKFETPIQLRGFEKVELSPGEKKTVDLRLLRRDLSVWDTTRQSWIVESGTYEALIGVAVNDIKTSVLFTI

SEQ ID NO: 189 - DNA, 1343 bp, Trichoderma reesei
atgacaccacacagcatcgatagagccgcaagaccttccgtatggtctggtctagcctttacttagtacggcccacgccatagtgatgcctgatggagttacaggtaaagtgccatttgggttggaatagttggaatgcctaccactgcgatatagacgaatctaagtttttgtgccgctgaagtaattgtttcctccggtttgttagatgctggatacaattacgtgaatagatgattgctggtcaatgaaggacgggagagttgatggtcatatagcggttaatacaaagatttccagatggaattgatgggttagcgaaaaaggttcatgacttgggactgaagcggcatctactctacagctggaactgctacttgtgctgggtatcctgcttctcttggttgaagatgtagatgcagccgactttgcagactggggagtagactacttgaagtacgacatgtaatgtgccttctgattggcaggatgaatatgttgcttgcgcaccagacgctgtccacgggtccaaacggcacctgttctactgccttggaaccaaatcttgcaccaccaggttgattggtctacctcaaaatcagctgaacgattcaatgctatgcgtaacgcattagcaacagtctagggaaatcgtcttgtcactgtgtatttggggcgtcgcggatgtattttcctggtaatgaaacaggaatatcttggagaatgtcaggtgatattagtccagaatggggctgtgactcatatcatcaacatgaattcctttaagatgaactcagtcggattttgggggcaacgacgctgatattttggaagttggtaatggtaacctcactgcagctgagactagaacatttcgcattgtgggctgcaatgaaatcacctctactaattggcactgacttagctcctgtctcaagagaacattgagctacttaaaaacaagcatctcttagccttcaaccaagtcagtttacggtcaaccagccactccttacaaatggggcgtcaatccagactggacataactacaccaatcctgcagaatattgggctggtccaagctctaaaggccatctcgtgcatgatgaatacactagatcatacagtcagaaaagaggcaaaatggagtgagatccctgctgtctgcaggtagatacgaagtaagagatgtttggaccgataaaagcttgggttgtttctagttacaagacagcggttgctgctcatgatacagcagttatcttagtcgggaaaatgtcgtaactgggatgatgatgatgacaaaggtggttctcctccttctcatcatcacccaccactaa

SEQ ID NO: 190 - protein, 462 aa, Trichoderma reesei
MTPHSIDRAARPSVWSGLALLLSTAHAIVMPDGVTGKVPSLGWNSWNAYHCDIDESKFLSAAEVIVSSGLLDAGYNYVNIDDCWSMKDGRVDGHIAVNTTRFPDGIDGLAKKVHDLGLKLGIYSTAGTATCAGYPASLGYEDVDAADFADWGVDYLKYDNCNVPSDWQDEYVACAPDAVQTGPNGTCSTALEPNLAPPGYDWSTSKSAERFNAMRNALAKQSREIVLSLCIWGVADVFSWGNETGISWRMSGDISPEWGSVTHIINMNSFKMNSVGFWGHNDADILEVGNGNLTAAETRTHFALWAAMKSPLLIGTDLAQLSQENIELLKNKHLLAFNQDSVYGQPATPYKWGVNPDWTFNYTNPAEYWAGPSSKGHLVLMMNTLDHTVRKEAKWSEIPGLSAGRYEVRDVWTDKSLGCLSSYKTAVAAHDTAVILVGKKCRNWDDDDDKGGSPPSHHHHHH

SEQ ID NO: 191 - DNA, 1321 bp, Trichoderma reesei
atgatgatgctctcaaagagtctcctttccgctgcaactgcagcctcagcgctggccggtactgcagcctgttccacgtgcttcgagctttgtaaccatatccggcacccaattcaatcgatggcaaagtaggctactttgcgggcaccaactgctactggtgctcgttcctgaaaccacgccgacgttgattccacctttagccacatctcttcctctggcctcaaggtagcgtgtatggggcttcaacgacgtcaacacgcagccctctcccggccagatctggttccaagctgtccgctacggggtctacgatcaacacgggagctgatgggctgcagactctcgtacgtagtccagtcagccgagcagcacaacctcaagctcatcatcccgttcgtcaacatggagcgactacggcgggataaacgcctatgtcaacgcctttggcggcaatgcgaccatggtacactaacacggccgcgcaaactcagtaccgcaagtacgtccaggccgtcgtcacgctacgcaaactcgacggccatctttgcgtgggagctgggcaacgagcctcgctgcagggtgcagtactgatgtgattgttcagtgggcgacgagtgtgtcccaatatgtcaagtcttgattcgaaccatctcgtgacgcttggagacgaggggctcggtctcagtactggagggcgcttatccgtatacttatggcgagggcactgattttgccaagaatgtacaaatcatcgcttgactttggtactttccacctctatccggactcttggggaacaaactacacttggcaatggctggattcagactcatgccgccgcttgtttagcagcaggcaaaccttgcgtttgaagaatacggcgcacagcaaaacccctgcaccaacgaggcaccctggcaaacaatctctcacgactcgcggcatgggtggcgacatgttttggcagtggggagacacttttgaacggtgcccagtcgaacagtgacccgtacaccgtctggtacaactcatcgaactggctgcttggtcaagaaccacgttgatgctattaacggcggtacaaccactcctcctcccgtcatcgacgacgacaacctcgtctaggacctcgtcgacgcctccaccgcctgggggcatgctcgcccttgtatggccagtgtggaggttctggatacactggtcccacgtgctgtgcagggaacttgtatatattccaactactggtactcgcaatgcctgaatacagatgatggacaaaggtggttctcctccttctcatcatcaccaccaccactga

SEQ ID NO: 192 - protein, 454 aa, Trichoderma reesei
MMMLSKSLLSAATAASALAAVLQPVPRASSFVTISGTQFNIDGKVGYFAGTNCYWCSFLTNHADVDSTFSHISSSGLKVVRVWGFNDVNTQPSPGQIWFQKLSATGSTINTGADGLQTLDYVVQSAEQHNLKLIIPFVNNWSDYGGINAYVNAFGGNATTWYTNTAAQTQYRKYVQAVVSRYANSTAIFAWELGNEPRCNGCSTDVIVQWATSVSQYVKSLDSNHLVTLGDEGLGLSTGDGAYPYTYGEGTDFAKNVQIKSLDFGTFHLYPDSWGTNYTWGNGWIQTHAAACLAAGKPCVFEEYGAQQNPCTNEAPWQTTSLTTRGMGGDMFWQWGDTFANGAQSNSDPYTVWYNSSNWQCLVKNHVDAINGGTTTPPPVSSTTTTSSRTSSTPPPPGGSCSPLYGQCGGSGYTGPTCCAQGTCIYSNYWYSQCLNTDDDDKGGSPPSHHHHHH

SEQ ID NO: 193 - DNA, 1140 bp, Neosartorya fischeri
atgaagttctccttcctcaccgtggccagcttcctcatagggcaagtagccctggccgttgtcagctaaaaagttcgccagtgcatctgatctacaattcacaatagacgggaaaaggttactttgcaggttctaattcatactggattgggtttttaactaataacgcagatggatctagtgtttgatcacatgaaggagtcaggcttgaagatcctgcgtgtatggggctaatgacgtaaacacagtaccagggcaaggaacagtgtattaccaagtccatgctaatgaagtcaacaatcaacacaggcgctgacggtttacaaagattggattacgttgtccattgctgagaaaagaggcatcaaattgattatcaactttgttaataactgggatgattatgggcatgaatgcttacgtgaaggcctatggcgaaactgatcataatgcattttactctaaaaaatatacagaatgcctacaggagatatgttaaggcagtagtttctagatacaccaagtccagcggtctttgcctgggaactagctaatgaacctagatgtaaaggttgtgacagaagttttatacgaatggattaagtctacttccgaatacatcaaaaagttagataaaacacatggtctgcattggagatgaaggatttggtcttgatctgttgagcgacggttcatccatacacttatgttgaaggttccaactttacgagaaaccttgcaataccaacaatcgtttggtacttttcatttgtacccagactcctggggtacaacacatgaatggggcaatgtgggctcaatctcatggagcagcttgcaaagcagctggtaaaccatgcctattcgaggtatggtgttacatctaatcattgtgctttagaaactccttggcagaaaacatcacttaacgactggagtcagtggagacttgtactggcaatacggagacactttatctactggactcaccaaacgatggtaacactatctactatggcacagatgagttcaaatgtattgttagatcatgttgcagctattaaggcgaaacagggttgggtggatgatgatgacaaaggtgtctcctccttctcatcatcaccaccaccacgtgtttaa

SEQ ID NO: 194 - protein, 390 aa, Neosartorya fischeri
MKFSFLTVASFLIGQVALAALSAKKFASASDLQFTIDGKTGYFAGSNSYWIGFLTNNADVDLVFDHMKESGLKILRVWGFNDVNTVPGQGTVYYQVHANGKSTINTGADGLQRLDYVVHSAEKRGIKLIINFVNNWDDYGGMNAYVKAYGETDHNAFYSNKNIQNAYRRYVKAVVSRYTNSPAVFAWELANEPRCKGCDTEVLYEWIKSTSEYIKKLDKRHMVCIGDEGFGLDLLSDGSYPYTYVEGSNFTRNLAIPTIDFGTFHLYPDSWGTTHEWGNGWAQSHGAACKAAGKPCLFEEYGVTSNHCALETPWQKTSLNTTGVSGDLYWQYGDTLSTGQSPNDGNTIYYGTDEFKCIVKDHVAAIKAKQGWVDDDDKGGSPPSHHHHHH

SEQ ID NO: 195 - DNA, 1334 bp, Aspergillus fumigatus
atgttgttgcaagcttttttgtttttgttggctggttttgctgctaaaatttctgctccaaccagctgcttcttctgctggtaatccaaaattgactacttacaagtgtactactgggtggttgtgttgctcaagatacttctgttgttttggattggggttatcattggattcactgttgatggttatacttcttgtactacttcttctggtgttgattctactttgtgtcgatgctgctacttgtgctaaaaactgtgttattgaaccagctaattatacatctgctggttactacttctggtgattctttgacaatgtaccaatacgttcaatctaatggtgtttactaatgcttctccaagattgtatttgttgggtccagataaaaactacgtcatgttgattgttgggtcaagaattgacttttgatgttgatttgtctactttgccatgtggtgaaaggtgctttgtatttgtctgaaatgtctgctactggtggtagaaatgaatacaatactgggtgctgaatatggttctggttattgtgatgctcaatgtccagttattgcttggaaaaggtactttgaatacatctggtgcttcatattgttgtaacgaaatggatattttggaagaattctagagctaattcttatactccacatccatgttctgctactgattgtgataaagggttgtggttttaatccatatgctttgggtcaaaaatcttattggggtccaggtggtagttgatacttctaagccattcactattactactcaattcattacaaacgatggtactaactggtactttgtcagaaattagaagacaatacatgcaaaacggtaaggttattgctagctgtttcttctacaggtgttaactctattactgaagattggtgtacttcagttgatgtctgctgctacttttggtggtttgactactatgggtaaagctttgggtagaggtatggttgattttctctatttggaatgatgcttctggttttatgaattggttggattctggtagctggtccatgttcttctacagaaggtaatccagatttgattaaggctcaaaatccaaactcatgttgttttctcaaatattagatggggtgatattggttctacttttaaaggttgatggttctgttactactactacttctacaacttctactaagactactacatctactgccaggtccaactcaaactcattatggtcaatgtggtggtcaaggttggactggtccaagcttgtgcttctccatatacttgtcaagttttgaatccatggtactctcaatgcttat

SEQ ID NO: 196 - protein, 459 aa, Aspergillus fumigatus
MLLQAFLFLLAGFAAKISAQQPAASSAGNPKLTTYKCTTAGGCVAQDTSVVLDWGYHWIHTVDGYTSCTTSSGVDSTLCPDAATCAKNCVIEPANYTSAGVTTSGDSLTMYQYVQSNGVYTNASPRLYLLGPDKNYVMLKLLGQELTFDVDLSTLPCGENGALYLSEMSATGGRNEYNTGGAEYGSGYCDAQCPVIAWKNGTLNTSGASYCCNEMDILEANSRANSYTPHPCSATDCDKGGCGFNPYALGQKSYWGPGGTVDTSKPFTITTQFITNDGTTTGTLSEIRRQYMQNGKVIANAVSSTGVNSITEDWCTSVDGSAATFGGLTTMGKALGRGMVLIFSIWNDASGFMNWLDSGNAGPCSSTEGNPDLIKAQNPTTHVVFSNIRWGDIGSTFKGSDGSVTTTTSTTSTKTTTSTAPGPTQTHYGQCGGQGWTGPTACASPYTCQVLNPWYSQCL

SEQ ID NO: 197 - DNA, 2551 bp, Aspergillus aculeatus
atgatgaagctcagttggcttgaggcggctgccttgacggctgcttcagtcgtcagcggatgaattagccttttccccaccattttacccatctccttgggctaatggacaaggcgtgggccgaagcataccagagagccgttgctattgttagtcagatgacacttgatgaaagtgaatttgactacaggtacggggtgggaattagaaaagtgtgtaggtcaaactggtggttccaagattaaacatcggagggatgtgcttacaagatagtccactaggtatcagagtctgattacaattctgcttttcctgcaggcgttaatgttgccgcaacgtgggacaaaattagcctacctaagaggtcaagctatgggtcaggaattttcagataagggcatcgatgcaattaggcccagccgcaggaccattgggacgatctccagatggtgggagaaactgggggattctcacctgaccctgcacttactggtgttctgtttgcagaaactatcaaaggtacaagacgccggtgttgttgcgacagctaaacactacattttgaatgaacaagagcattagacaagtggctgaggccgctgggtacggtttcaacatatccgatacaatctcatcaagtggacgacaagacgattcatgagatgtatttgtggccatttgctgatgcagtgagagggcgttggggctataatgtgcagctacaatcaaatcaataatagttatggctgtcaaatcatacactctcaataagttattgaaggctgaactgggtttccaaggtttcgtaatgtgattggggtgcccatcactccggtgtcggttctgctttagctggtcttgacatgtctacctggtgacattacatttgactccgcaacatctttctggggaacaaatctgacaattggtccttaacggcaccgtgccacagtggagagttgacgacatggcagtccgtattatgggcatattacaaagtcggccgtgaccgactgtaccaaccaccaaacttcagctcctggaagagatgaatacggctttaagtacttttatccacaggagggaccatacgaaaaagttacactttgtcaatgtccagaggaatcattccgaagtcatcagaaagctaggtgcagattacagttttgttgaaaaacaataacgcattgcctttaacaggtaaagagcgaaaggttgatcttgggtgaagatgcgggttctaatagttacggagccaatgggtgttcagatagagtgcgataacggtactttagcaatggcctggggatcaggcacagctgaatttccataccgtgacacctgaacaagcaatccaagctgaagtattgaaacataaagggtcagtttatgataaccgacaattgggcattgtctcaagtcgaaaccctcgcaaaacaagcctctgttattggtttttgtgaatagtgatgctggtgaagggtacatttcagttgatggaaacgaaggatagaaataacctcacattgtggaaaaatggcgataatcttattaaggctgctgcgaaattgtaacaatactattgtggttatccattctgtagggcctgtccttgttgacgaattacgaccatccaaatgtgacagctatactatgggcaggcttaccaggtcaagagtctgaattccttagcagatgtactctacggacgtgtcaatcctggagctaagtctccattcatggggtaagactagagaggcttacggagattacttagtaagagaattgaacaatggcaggtgcgccacaagatgatttctctgaaggtgtttttatcgattatagagggttcgacaagaaacgagactccaatctacgagtttggtcatggtttgagttatacaacttttaacttcagggcttcatattcaagtactaaacgcatcttctaacgcccaagtagcaacggaaaggcgcagctccaactttcggtcaggtgggtaatgcctcagattatgtttatccagaagctcacaaggatttcaaagttcatatacccttggctaaactctacagatttgaaagcattccggtgatccatactatggtgttgatactgcagaacatgtgcctgaaggcgctactgggatcaccacaacctgttctgcctgctggaggtggttcaggagggaaccctagactctgatgagttaattagggtatctgttactgtgaaaaacacagggagagtggcgggtgatggtgcctcaactatacgtgtctcttggaggaccaaatgaaccaaaagtagttttgagaattcgacagattaacattgaaaccatccgaggaaactgtttggactactaccctgacccagagatttgtctaattgggacgtagctgcccaagattgggtcatcacaagttaccctaaaagtacatgttggctctagttccagacaacttccattacacgctgccctgccaaaagcaagatgatgatgacaaaggtggttctcctccttctcatcatcaccaccaccactaa

SEQ ID NO: 198 - protein, 878 aa, Aspergillus aculeatus
MMKLSWLEAAALTAASVVSADELAFSPPFYPSPWANGQGEWAEAYQRAVAIVSQMTLDEKVNLTTGTGWELEKCVGQTGGVPRLNIGGMCLQDSPLGIRDSDYNSAFPAGVNVAATWDKNLAYLRGQAMGQEFSDKGIDVQLGPAAGPLGRSPDGGRNWEGFSPDPALTGVLFAETIKGIQDAGVVATAKHYILNEQEHFRQVAEAAGYGFNISDTISSNVDDKTIHEMYLWPFADAVRAGVGAIMCSYNQINNSYGCQNSYTLNKLLKAELGFQGFVMSDWGAHHSGVGSALAGLDMSMPGDITFDSATSFWGTNLTIAVLNGTVPQWRVDDMAVRIMAAYYKVGRDRLYQPPNFSSWTRDEYGFKYFYPQEGPYEKVNHFVNVQRNHSEVIRKLGADSTVLLKNNNALPLTGKERKVAILGEDAGSNSYGANGCSDRGCDNGTLAMAWGSGTAEFPYLVTPEQAIQAEVLKHKGSVYAITDNWALSQVETLAKQASVSLVFVNSDAGEGYISVDGNEGDRNNLTLWKNGDNLIKAAANNCNNTIVVIHSVGPVLVDEWYDHPNVTAILWAGLPGQESGNSLADVLYGRVNPGAKSPFTWGKTREAYGDYLVRELNNGNGAPQDDFSEGVFIDYRGFDKRNETPIYEFGHGLSYTTFNYSGLHIQVLNASSNAQVATETGAAPTFGQVGNASDYVYPEGLTRISKFIYPWLNSTDLKASSGDPYYGVDTAEHVPEGATDGSPQPVLPAGGGSGGNPRLYDELIRVSVTVKNTGRVAGDAVPQLYVSLGGPNEPKVVLRKFDRLTLKPSEETVWTTTLTRRDLSNWDVAAQDWVITSYPKKVHVGSSSRQLPLHAALPKVQDDDDKGGSPPSHHHHHH

SEQ ID NO: 199 - DNA, 720 bp, Saccharomyces cerevisiae
atggccacaattttggttttgataagaaactataatggtggtcatcaacaagcaattaggtgagtgggatattgccggcgtggctaaaaatgagtatgatctggaagacaaaataatcaacggtaggtgccggtagaattggatatagggttctggaaagattggtcgcatttaccgaagaagttactgtactacgactaccaggaactacctgcggaagcaatcaatagataacgaggccagcaagcttttcaatggcagaggtgatattgttcagagagtagagaaatgaggatatggttgctcagtcagatgttgttaccatcaactgtccattgcacaaggactaggggtttattcaataaaaagcttatttcccacatgaaagatggtgcatacttggtgaaccgctagaggtgctatttgtgtcgcagaagatgttgccgaggcagtcaagtctggtattggctggctatggtggtgatgtctgggataagcaaccagcaccaaaagaccatccctaggactatggacaataaggaccacgtgggaaacgcaatgactgttcatatcagtggcatctctggatgctcaaaagaggtacgctcagggagtaaagaacatcctaaatagttacttccaaaaagtttgattaccgtccacaggatattattgtgcagaatggttcttatgccaagagcttatggacagaagaaataa

SEQ ID NO: 200 - protein, 247 aa, Saccharomyces cerevisiae
MATILVLIRNYNGGHQQAINGEWDIAGVAKNEYDLEDKIISTVGAGRIGYRVLERLVAFNPKKLLYYDYQELPAEAINRLNEASKLFNGRGDIVQRVEKLEDMVAQSDVVTINCPLHKDSRGLFNKKLISHMKDGAYLVNTARGAICVAEDVAEAVKSGKLAGYGGDVWDKQPAPKDHPWRTMDNKDHVGNAMTVHISGTSLDAQKRYAQGVKNILNSYFSKKFDYRPQDIIVQNGSYATRAYGQKK

SEQ ID NO: 201 - DNA, 1096 bp, Saccharomyces cerevisiae
atgtcgaagggaaaggttttgctggttctttatgaaggtggtaagcatgctgaagagcgaaaagttattggggtgtattgaaaatgaacttggtatcagaaatttcattgaagaacggatacgagttggttactaccattgacaaggaccctgagccaacctcaacggtagacagagttgaaagacgctgaaattgtcattactacgccctttttccccgcctacatctcgaaacaggattgcagaagctcctaacctgaagctctgtgtaaccgctggcgtcggttcagcatgtcgatttagaagctgcaaatgaacggaaaatcacggtcaccgaagttactggttaacgtcgtttctgtcgcagagcacgttatggccacaattttggttttgataagaaactaatggtggtcatcaataagcaattaatggtgagtgggatattgccggcgtggctaaaatgagtatgatctggaagacaaaataatttcaacggtaggtgccggtagaattggatatggttctggaaagattggtcgcatttaatccgaagaagttactgtactacgactaccagactacctgcggaagcaatcaatagattgaacgaggccagcaagcttttcaatggcagatgatattgttcagagagtagagaaattggaggatatggttgctcagtcagatgttgttcatcaactgtccattgcacaaggactcaaggggtttattcaataaaaagcttatttcccatgaaagatggtgcatacttggtgaataccgctagaggtgctatttgtgtcgcagaatgttgccgaggcagtcaagtctggtaaattggctggctatggtggtgatgtctgggatgcaaccagcaccaaaagaccatccctggaggactatggacaataaggaccacgtgggacgcaatgactgttcatatcagtggcacatctctgcatgctcaaaagaggtacgctcagagtaaagaacatcctaaatagttacttttccaaaaagtttgattaccgtccacaggattattgtgcagaatggttcttatgccaccagagcttatggacagaagaaataa

SEQ ID NO: 202 - protein, 145 aa, Saccharomyces cerevisiae
MSKGKVLLVLYEGGKHAEEQEKLLGCIENELGIRNFIEEQGYELVTTIDKDPEPTSTVDRELKDAEIVITTPFFPAYISRNRIAEAPNLKLCVTAGVGSDHVDLEAANERKITVTEVTGSNVVSVAEHVMATILVLIRNYNGGHQ

SEQ ID NO: 203 - protein, 236 aa, Saccharomyces cerevisiae
MVVINKQLMVSGILPAWLKNEYDLEDKIISTVGAGRIGYRVLERLVAFNPKKLLYYDYQELPAEAINRLNEASKLFNGRGDIVQRVEKLEDMVAQSDVVTINCPLHKDSRGLFNKKLISHMKDGAYLVNTARGAICVAEDVAEAVKSGKLAGYGGDVWDKQPAPKDHPWRTMDNKDHVGNAMTVHISGTSLHAQKRYAQGVKNILNSYFSKKFDYRPQDIIVQNGSYATRAYGQKK

SEQ ID NO: 204 - DNA, 1279 bp, Saccharomyces cerevisiae
atgcttgctgtcagaagattaacaagatacacattccttaagcgaacgcatccggtgttatactcgtcgtgcatataaaattttgccttcaagatctactttcctaagaagatcatttacaaacacaactgcactcaaagatgactgctcatactaatatcaaacagcacaaactgtcatgaggaccatcctatcagaagatcggactctgccgtgtcaattgtacatttgacgtgcgcccttcaaggttacagtgattggttctggtaactgggggaccaccatcgccagtcattgcggaaaacacagaattgcattcccatatcttcgagccagaggtgagaatgtgtttttgatgaaaagatcggcgacgaaaatctgacagatatcataaatacaagacaccaacgttaaatatctacccaatattgacctgccccataatctagtggccgatcctgatcttacactccatcaagggtgctgacatccttgttttcaacatccctcatcaatttttacaacatagtcaaacaattgcaaggccacgtggcccctcatgtaagggccatctcgtgtcaaagggttcgagttgggctccaagggtgtgcaattgctatcctcctatgttactgatgttaggaatccaatgtggcgcactatctggtgcaaacttggcaccggaagtggccaaggcattggtccgaaaccaccgtggcttaccaactaccaaaggattatcaaggtgatggcagatgtagatcataagattttgaaattgctgttccacagaccttacttccacgtcaatgatcgatgatgttgctggtatatccattgccggtgccttgaagaacgtcgtggcacttgtgtggtttcgtagaaggtatgggatggggtaacaatgcctccgcagccattcaaaggcggtttaggtgaaattatcaagttcggtagaatgtttttcccagaatccaaagtcgaaatactatcaagaatccgctggtattgcagatctgatcaccacctgctcaggcggtagaagtcaaggttgccacatacatggccaagaccggtaagtcagccttggaagcagaaaaggttgcttaacggtcaatccgcccaagggataatcacatgcagagaagttcacgagtggccaaacatgtgagttgacccaagaattcccattattcgaggcagtctaccagatagtctaacaacgtccgcatggaagacctaccggagatgattgaagagctagacatcgatgacgtag

SEQ ID NO: 205 - protein, 440 aa, Saccharomyces cerevisiae
MLAVRRLTRYTFLKRTHPVLYTRRAYKILPSRSTFLRRSLLQTQLHSKMTAHTNIKQHKHCHEDHPIRRSDSAVSIVHLKRAPFKVTVIGSGNWGTTIAKVIAENTELHSHIFEPEVRMWVFDEKIGDENLTDIINTRHQNVKYLPNIDLPHNLVADPDLLHSIKGADILVFNIPHQFLPNIVKQLQGHVAPHVRAISCLKGFELGSKGVQLLSSYVTDELGIQCGALSGANLAPEVAKEHWSETTVAYQLPKDYQGDGKDVDHKILKLLFHRPYFHVNVIDDVAGISIAGALKNVVALACGFVEGMGWGNNASAAIQRLGLGEIIKFGRMFFPESKVETYYQESAGIADLITTCSGGRNVKVATYMAKTGKSALEAEKELLNGQSAQGIITCREVHEWLQTCELTQEFPLFEAVYQIVYNNVRMEDLPEMIEELDIDDE

SEQ ID NO: 206 - DNA, 1138 bp, Saccharomyces cerevisiae
atgtctgctgctgctgatagattaaacttaacttccggccacttgaatgctggtagaaagaagttcctcttctgtttctttgaaggctgccgaaaagcctttcaaggttactgtgaggatctggtaattggggtactactattgccaaggtggttgccgaaaattgtaagggatccagaagttttcgctccaatagtacaaatgtgggtgttcgaagaagagatcaatggtgaaattgactgaaatcataaatactagacatcaaaacgtgaaatacttgcctggcatcactacccgacaatttggttgctaatccagacttgattgattcagtcaaggatgtcgacaatcgttttcaacattccacatcaatttttgccccgtatctgtagccaattgaaaggtcgttgattcacacgtcagagctatctcctgtctgaagggttttgaagttggtgctaaaggtccaattgctatcctcttacatcactgaggaactaggtattcaatgtggtgctctatggtgctaacattgccactgaagtcgctcaagaacactggtctgaaacaacagttgcttcacattccaaaggatttcaggggcgagggcaaggacgtcgaccataaggttctaaaggttgttccacagaccttacttccacgttagtgtcatcgaagatgttgctggtatctccatgtggtgctttgaagaacgttgttgccttaggttgtggtttcgtcgaaggtctaggctggtaacaacgcttctgctgccatccaaagagtcggtttgggtgagatcatcagattcgcaaatgtttttcccagaatctagagaagaaacatactaccaagagtctgctggtgttggatttgatcaccacctgcgctggtggtagaaacgtcaaggttgctaggctaatggctatctggtaaggacgcctgggaatgtgaaaaggagttgttgaatggccaatccgctcaagttaattacctgcaaagaagttcacgaatggttggaaacatgtggctctgtcgaagactccattatttgaagccgtataccaaatcgtttacaacaactacccaatgaagaacctgcgacatgattgaagaattagatctacatgaagattag

SEQ ID NO: 207 - protein, 391 aa, Saccharomyces cerevisiae
MSAAADRLNLTSGHLNAGRKRSSSSVSLKAAEKPFKVTVIGSGNWGTTIAKVVAENCKGYPEVFAPIVQMWVFEEEINGEKLTEIINTRHQNVKYLPGITLPDNLVANPDLIDSVKDVDIIVFNIPHQFLPRICSQLKGHVDSHVRAISCLKGFEVGAKGVQLLSSYITEELGIQCGALSGANIATEVAQEHWSETTVAYHIPKDFRGEGKDVDHKVLKALFHRPYFHVSVIEDVAGISICGALKNVVALGCGFVEGLGWGNNASAAIQRVGLGEIIRFGQMFFPESREETYYQESAGVADLITTCAGGRNVKVARLMATSGKDAWECEKELLNGQSAQGLITCKEVHEWLETCGSVEDFPLFEAVYQIVYNNYPMKNLPDMIEELDLHED

SEQ ID NO: 208 - DNA, 463 bp, Saccharomyces cerevisiae
atggtgacagggggaatggcaagcaagtgggatcagaagggtatggacattgcctatggaggcggccttaggttacaaagagggtggtgttcctattggcggatgtcttatcaataaaagacggaagtgttctcggtcgtggtcacaacatgagatttcaaaagggatccgccactacatggtgagatctccactttggaaaactgtgggagattagagggcaaagtgtacagataccactttgtatacgacgctgtctccatgcgacatgtgtacaggtgccatcatcatatggtattccacgctgtgttgtcggtgagaacgttaatttcaaaagtaagggcgagatatttacaaactagaggtcacgaggttgttgttgttgacgatgagaggtgtaaaaagaatgaaacaatttatcgatgaaagacctcaggattggtttgaagatattggtgagtag

SEQ ID NO: 209 - protein, 158 aa, Saccharomyces cerevisiae
MVTGGMASKWDQKGMDIAYEEAALGYKEGGVPIGGCLINNKDGSVLGRGHNMRFQKGSATLHGEISTLENCGRLEGKVYKDTTLYTTLSPCDMCTGAIIMYGIPRCVVGENVNFKSKGEKYLQTRGHEVVVVDDERCKKIMKQFIDERPQDWFEDIGE

SEQ ID NO: 210 - DNA, 207 bp, Saccharomyces cerevisiae
atgggcagttctcgcgttattcgtcatcaggcaagtaattatgcccaatcagcttacctgtcacataaaggaaccactattatccctttttggtaatgaaaaacaacactcttccgacgacagccgctgcggcaattacttttccccaaaagctcataatcgatcaattaacgcaaacgaaaaacaaaaaaaaattacgtaaattag

SEQ ID NO: 211 - protein, 70 aa, Saccharomyces cerevisiae
MGSSRVIRHQASNYAQSAYQCHIKEPLLSLFGNEKQHSSGTTAAAAITFPQKLIIDQLTRKRKTKKNYVN

SEQ ID NO: 212 - DNA, 1654 bp, Saccharomyces cerevisiae
atgaaggatttaaaattatcgaatttcaaaggcaaatttataagcagaaccagtcactggacttacgggtaagaagttgcggtatttcatcactatcgcatctatgacgggcttctctgtttggatacgaccaagggttgatggcaagtctaattactggtaaacagttcaactgaatttccagcaaccaaagaaaatggcgatcatgacagacacgcaactgtagtgcagggctacaacctcctgttatgaattaggttgtttcgcaggttctctattcgttatgttctggtgaaagaattggtagaaaaccattaatcctgatgggttccgtaataaccatcattggccgttatttctacatgcgcatttcgtggttactgggcattaggccagtttatcatcgagagtcgtcactggtgttggaacagggttgaatacatctactattcccgtttggcaatgaaatgtcaaaagctgaaaatagagggttgctggtcaatttagaaggttccacaattgtttggtactatgattgcttattggattgattttgggttgtcttataccaacagttctgcagtggagattccccgtgtcaatgcaaatcgtttttgctctcttcctgcttgctttcaattaaactacctgaatcgccacgttggctgatttctcaaagtcgaacagaagaagctctacttggtaggaacactagacgacgcggatccaaatgatgaggaagttataacagaaggctatgcttcacgatgctgttaacaggaccaaacacgagaaacattcactgtcaagttttctccagaggcaggtcccaaaatcttcagagggctttgattgcagcttcaacgcaatttccagcaatttactggttgtaacgctgccatatactactctactgtattattcaacaacaattaaattagactatagattatcaatgatcataggtggggtcttcgcaacaatctgccttatctactattggttcattttttctaattgaaaagctaggtagacgtaagctgtttattaggtgccacaggtcaagcagtttcattcacaattacatttgcatgcttggtcagaaaataaagaaaacgcaagaggtgctgccgtcggcttatttttgttcattacattctggtttgtctttgctatcattaccatggatatacccaccagaaattgcatcaatgaaagcgtgcatcaacaaacgctttctccacatgtactaattggttgtgtaactttgcggttgatgttcaccccaatatttattggacagtccggttggggttgctacttattttttgctgatgaattatttatacattccagttatcttctttttctaccctgaaaccgccggaagaattggaggaaatcgacatcatctttgctaaagcatacgaggatggcactcaaccatggagttgctaaccatttgcccaagttatccctacaagaagtcgaagatcatgccaatgcatggctcttatgacgacgaaatggaaaaagaggactttggtgaagatagagtagaagacatataaccaaattaacggcgataattcgtctagttcttcaaacatcaaaaatgaagatagtgaacgataaagcaaattttgagggttga

SEQ ID NO: 213 - protein, 569 aa, Saccharomyces cerevisiae; identical to SEQ ID NO: 140

SEQ ID NO: 214 - DNA, 909 bp, Saccharomyces cerevisiae
atgcctgctactttgcatgattctacgaaaatcctttctctaaatactggagcccaaacctcaaataggtttaggtacgtggcagtcgaaagagaacgatgcttataaggctgtttgccgctttgaaagatggctaccgacacattgatactgctgctatttaccgtaatgaagcaagtcggtcaagccatcaaggattcaggtgttcctcgggaagaaatctttgttactaaagttatggtgtacacaacaccacgaacctgaagtagcgctggatcaatcactaaaaattaggattggactacgtagacttgtatttgatgcattggcctgccagattagatccagtacatcaaaaatgaagacatcttgagtgtgccaacaaagaaggatggttctcgtgcaggatatcaccaattggaatttcatcaaaacctgggaattaatgcaggaactaccaaagaggtaaaactaaggccgttggagtctccaacttttctataaataacctgaaagatctatgcatctcaaggtaataagcttacgccagctgctaaccaagtcgaaatacatccattaccctcaagacgaattgattaatttttgtaaaagtaaaggcattgtggttgaagcttattccgttaggtagtaccgatgctccactattgaaggaaccggttatccttgaaattgcgaaaaaataacgttcaacccggacacgttgttattagctggcacgtccaaagaggttatggtcttgccaaaatctgtgaatcccgatcgaatcataacgaacaggaaaatatttactttctactgaggactttgaagctatcaataacatatcgaaggaaaagggcgaaaaaaggggtacatccaaattggtctcctttcgaagtattcaagtaa

SEQ ID NO: 215 - protein, 312 aa, Saccharomyces cerevisiae
MPATLHDSTKILSLNTGAQIPQIGLGTWQSKENDAYKAVLAALKDGYRHIDTAAIYRNEDQVGQAIKDSGVPREEIFVTTKLWCTQHHEPEVALDQSLKRLGLDYVDLYLMHWPARLDPAYIKNEDILSVPTKKDGSRAVDITNWNFIKTWELMQELPKTGKTKAVGVSNFSINNLKDLLASQGNKLTPAANQVEIHPLLPQDELINFCKSKGIVVEAYSPLGSTDAPLLKEPVILEIAKKNNVQPGHVVISWHVQRGYVVLPKSVNPDRIITNRKIFTLSTEDFEAINNISKEKGEKRVVHPNWSPFEVFK

SEQ ID NO: 216 - protein, 1697 aa, Saccharomyces cerevisiae
ATGTCCGCTAAATCGTTTGAAGTCACAGATCCAGTCAATTCAAGTCTCAAAGGGTTTGCTTGCTAACCCCTCCATTACGCTGGTCCCTGAAGAAAAAATTCTCTTCAGAAAGACCGTCCGACAAGATCGCATTAATTTCTGGTGGTGGTAGTGGACATGAACCTACACACGCCGTTCATTGGTAAGGGTATGTTGAGTGGCGCCGTGGTTGGCGAAATTTTTGCATCCCCTTACAAAACAGATTTTAAATGCAATCCGTTTAGTCAATGAAAATGCGTCTGGCGTTTTATATTGTGAAGAACTACACAGGTGATGTTTTGCATTTTGGTCTGTCCGCTGAGAGAGCAAGCCTTGGGTATTAACTGCCGCGTTGCTGTCATAGGTGATGATGTTGCAGTTGGCAGAGAAGGGTGGTATGGTTGGTAGAAGAGCATTGGCAGGTACCGTTTTGGTTCATAAGATTGGGTGCCTTCGCAGAAGAATATTCTAGTAAGTATGGCTTAGACGGTACAGCTAAAGTGGAAAATTATCAACGACAATTTGGTGACCATTGGATCTTCTTTAGACCATTGTAAAGTTCGGCAGGAAATTCGAAAGTGAATTAAACGAAAAACAAATGGAATTGGGTATGGGTATTCAACGAACCTGGTGTGAAAGTTTTAGACCCTATTCCTTCTACCGAAGACTTGATCTCCATATATGCTACCAAAACTATTGGATCCAAACGATAAGGATAGAGCTTTTGTAAAGTTTGGAAGATGATGAAGTTGTCTTGTTAGTTAACAATCTCGGCGGTGTTTCTAATTTTGTTAAGTTCTATCACTTCCAAAACTACGGATTTCTTAAAGGAAAATTACAACATAACCCCGGCAAACAATTGCTGGCACATTGATGACCTCCTTCAATGGTAATGGGTTCAGTATCACATCTAAACGCCACTAAGGCTACAAAGGCTTTGCAATCTGATTTTGAGGAGATCAAATCAGCTAGACTTGTTGAACGCATTTACGAACGCACCGGGCTGGCCAATTGCAGATTTTGAAAACTTCTGCCCCATCTGTTAACGATGACTTGTTACATAATGAAGTAACAGCAAAGGCCGGGTACCTATGACTTTGACAAGTTTGCTGAGTGGATGAAGAGTGGTGCTGAACAAGTTAAAGAGCGAACCGCACATTACGGAACTAGACAATCAAGTTGGTGATGGTGATTGTGGTTACTTTAGTGGCAGGAGTTAAAGGCATCACCGAAAACCTTGACAAGCTGTCGAAGGACTTTATCTCAGGCGGTTGCCCAAATTTCAGATTTCATTGAAGGCTCAATGGGAGGTACTTGGTGGTTTATATTCTATTCTTTTGTCGGGTTTTTCACACGGATTAATTCAGGTTTGTATCAAAGGATGAACCCGTCACTAAGGAAATTGTGGCTAAGTCACTCGGAATTGCATTGGACTTTATACAAATATACAAAGGCAAGGAAGGGATCATCCACCATGATTGATGCTTTAGCCATTCGTTAAAGAATTTACTGCATCTAAGGATTTCAATAAGGCGGTAAAAGCTGCAGGAAGGTGCTAAATCCACTGCTACATTCGAGGCCAAATTTGGCAGAGCTTCGTATGTCGGATTCATCTCAAGTAGAAGATCCTGGTGCAGTAGGCCTATGTGAGTTTTTGAAGGGGGCAAAGCGCCTTGTAA

SEQ ID NO: 217 - protein, 584 aa, Saccharomyces cerevisiae
MSAKSFEVTDPVNSSLKGFALANPSITLVPEEKILFRKTDSDKIALISGGGSGHEPTHAGFIGKGMLSGAVVGEIFASPSTKQILNAIRLVNENASGVLLIVKNYTGDVLHFGLSAERARALGINCRVAVIGDDVAVGREKGGMVGRRALAGTVLVHKIVGAFAEEYSSKYGLDGTAKVAKIINDNLVTIGSSLDHCKVPGRKFESELNEKQMELGMGIHNEPGVKVLDPIPSTEDLISKYMLPKLLDPNDKDRAFVKFDEDDEVVLLVNNLGGVSNFVISSITSKTTDFLKENYNITPVQTIAGTLMTSFNGNGFSITLLNATKATKALQSDFEEIKSVLDLLNAFTNAPGWPIADFEKTSAPSVNDDLLHNEVTAKAVGTYDFDKFAEWMKSGAEQVIKSEPHITELDNQVGDGDCGYTLVAGVKGITENLDKLSKDSLSQAVAQISDFIEGSMGGTSGGLYSILLSGFSHGLIQVCKSKDEPVTKEIVAKSLGIALDTLYKYTKARKGSSTMIDALEPFVKEFTASKDFNKAVKAAEEGAKSTATFEAKFGRASYVGDSSQVEDPGAVGLCEFLKGVQSAL

SEQ ID NO: 218 - DNA, 2643 bp, Bifidobacterium adolescentis
atggccgacgccaagaagaaagaagaacctactaagccaaccccagaagaaaaattgggctgctgaagctgaagttgatgctttggttaagaaaggtttgaaggccttggacgaatgaaaaattggatcaaaagcaagtcgatcacatcgttgctaaagcttcagttgctgcttaacaaacatttggttttggctaagatggccgttgaagaaactcatagaggtttggttggataaggccaccaagaatattttcgcttgtgaacatgtcaccaactatttggctggtcaagaccgttggtatcattagagaagatgatgttttgggtatcgacgaaattgctgaacgttggtgttgttgctggtgttactccagttactaatccaacttctaccgctattttcatccttgattgccttgaaaaccagatgcccaattatctttggttttcatccaggtgctcaactgttctgttgctgctgctaaaatcgttagagatgctgctattgctgctggtgctcgaaaactgtattcaatggattgaacacccatccattgaagctactggtgctttgatgacacgatggtgttgctactattttggctactggtggtccaggtatggttaaggctgctttcttctggtaaaccagctttgggtgttggtgctggtaatgctccagcttatgttgataaacgttgatgttgttagagctgccaacgatttgattttgtctaagcacttcgactacgatgatttgtgctactgaacaagctattatcgccgataaggatatctatgctccattggaaagaattgaagagaagaaaggcctacttcgttaatgctgacgaaaaagctaagttggcagtatatgttcggttgtaccgcttactctggtcaaactccaaagttgaattctgttgccaggtaagtccccacagtatattgctaaagctgccggtttcgaaattccagaagatgacaattttggccgctgaatgtaaagaagtcggagaaaacgaaccattgaccatggaaattggcaccagttcaagctgttttgaagtccgataacaaagaacaagccttcgaaatgtgaagccatgttgaaacatggtgctggtcatactgctgctattcatacaaacgatagagttggtcagagaatacggtcaaagaatgcatgcctgcagaattatttggaactctccattctttgggtggtgttggtgatatctacaatgctattgctccatctttgactttgggttggttcttatggtggtaattctgtttccggtaatgttcaagccgtcaacttgattaacaaagagaatcgctagaagaaacaacaacatgcaatggttcaagattccagctaagactttttgaacctaacgccatcaagtacctaagagatatgtacggtatcgaaaaggctgttagtttgcgataaggtcatggaacaattgggtatcgttgataagatcatcgatcaattgagccagatctaacagagttaccttcagaatcatcgattacgttgaaccagaaccatctggaaacagttgaaaggggtgctgctatgatgagagaagaatttgaacctgataccattagctgttggtggtggttctccaatggatgcttctaagattatgtggttgttgtacgaacccagaaatttcattctccgatgtcagagaaaagttcttcgacattagaaagagagcctaagattccaccattgggtaaaaaggccaagttggtatgtattccaacctcttcaggtaggttctgaagttactccattcgctgttattaccgatcataagactggttacaagtaccattaccgattatgctttgactccatctgttgctatcgttgatccagttttggctagaacaacctagaaaattggcttctgatgctggttttgatgctttgacacatgcttttgaagtacgtttctgtttacgctaacgatttcactgatggtatggctttacatgctgctaaatgtttgggataacttggctgaatccgttaatggtgaaccaggtgaagaaaaaactagagcaagaaaagatgcataacgctgctactatggctggtatggcatttggttctgctttttggtatgtgtcatggtatggctcatacaattggtgctttgtgtcatgttgctcatggtaactaactccattttgttgccatacgtcatcagatacaacggttctgttcctgaagaacacatcttggccaaagtacaacaagtatattgccccagaaagataccaagaaatcgctaaacttgggtgttaatccaggtaaaactcctgaagaaggtgttgaaaatttggctaagggtcgaagattacagagataacaagttgggtatgaacaagtccttccaagaatgtggtggacgaagattactactggtccattatcgatcaaattggtatgagagcctacgaagatctgtgctccagctaatccaagaattccacaaatcgaagatatgaaggatattgctattggcttactacggtgtttctcaagctgaaggtcataagttgagagttcaaagacaaggtggctgctacagaagaagcttctgaaagagcttaa

SEQ ID NO: 219 - protein, 910 aa, Bifidobacterium adolescentis; identical to SEQ ID NO: 103

SEQ ID NO: 220 - DNA, 851 bp, Bifidobacterium adolescentis
atgtccgaacacatcttcagatccactactagacacatgttgagagattccaaggactgttaatcaaactttgatgggtggtttgtctggtttcgaatctccaattggtttggatattggacagaatcaaggctttgaagtctggtgatatcggttttgttcattcctgggataaacacctctgttgatggtccaggtactagaatgactgtttttatgtctggttgcccatagatgtcaatactgtcaaaatccagacacctggaaaatgagagatggtaaaccagttttacgaagccatggtcaaaaagattgaaagatacgccgatttgttcaaagctactggtgggtattactttttctggtggtgaatctatgatgcaaccagcttttgtttccagagtttcatgctgctaagcaaatgggtgttcatacttgtttggatacctctggttttttgggtgtcttacactgatgatatggttgatgatatcgacttgtgcttgttggatgttaagtcaggatgaagaaacctaccataaggttaccggtggtattttacaacctaccattgatttcgcaaagattggctaaagccggtaaaaagatctgggttagattcgttttggtcccaggttacttcttctgaagaaaatgttgaaaacgtcgccaagatttgtgaaacttttggtgatgttggaacacattgatgttttgccatttcaccaattgggtagaccaaaatggcacatgtaatattccatacccattggaagatcaaaagggtccatctgctgctatgaagcaaagaggttgaacaattccaatcccatggtttcaccgtttactaa

SEQ ID NO: 221 - protein, 292 aa, Bifidobacterium adolescentis; identical to SEQ ID NO: 40

SEQ ID NO: 222 - DNA, 2298 bp, Bifidobacterium adolescentis
atggctgctgttgatgctaccgctgtttctcaagaagaattggaagctaaagcttgggggttttactgaaggtaactggcaaaaggatatcgatgttagagacttcatccaaaagatacactccatacgaaggtgatgaatcttttttggctgatgctaccgataagaccaaacttgtggaaatacttggacgacaactacttgtccgtcgaaagaaaacaaagagtttacggttgatactcatactccagctggtattgatgcttttccagctggttatattgattcccgaagttgataacgtcatcgttggtttacaaaccgatgttccatgtaagagggctatgaccaaatggtggttggagaatggttgaacaagctatcaaagaagccggtaaagaaccagccagaaatcaagaagatcttcaccaagtacagaaagacccataacgatggtgtttttggtttacaccaagcaaatcaaggttgctagacacaacaagattttgactggtttgccaggcttatggtagaggtagaattatcggtgattatagaagagttgccttgtacggtgttagctttgattaagttcaagcaaagagacaaggactccattccatacagaaacgatttcagaaccagaaatcgaacattggatcagattcagagaagaacacgacgaacaaatcaaggttgaagcaattgatcaacttgggtaacgaatacggtttggatttgtctagaccagctcactgctcaagaagctgttcaatggacttatatgggttatttggcttccgttaagtctcgatggtgctgctatgtcttttggtagagtttctaccttcttcgacgtctacttcgaaagatttgaaggctggtaagattactgaaaccgatgcccaagaaatcatcgataacttggatgaagttgagaatcgtcagattcttgagaactaaggattacgatgccattttctctggatccatattgggctacttggtctgatgctggttttggtgatgatggtagaactatggaccaagacctccttcagattattgaacactttgaccttggaacatttgggtccaggtcgaacctaacattactattttttgggacccaaagttgccagaagcttacaaaagattctgccagaatttctattgatacctccgctattcaatacgaatccgacaaagaaatcagatcattggggtgatgatgctgctattgcttgttgtgtttctccaatgagagtcggtaagcatgcaatttttcgctgctagagtcaactctgctaaggctttgttgtacgctattaacgggtagagacgaaatgactggtatgcaagtcatcgataagggtgttatcgatccaatcacctgaagctgatggtactttggactacgaaaaggttaaggctaattacgaaaaggcctgaatggttgtctgaaacttatgttatggccttgaacatcatccattacatgcatgatatacgcctacgaatctattgaaatggccttgcatgacaaagaagtctatagaactttggtgtggtatgtctggtttgtctattgctgctgattctttgtctgcttgtaagtacgctagtttacccaatctacaacaaggatgctaaaactactccaggtcacgaaaacgaatatggaaggtgctgatgatgatttgatcgttggttatagaaccgaaggtgactttccattatggtaacgatgatgatagagctgatgatattgccaagtgggttgtttctactgttatggcaagttaagagattgccagtttacagagatgctgttccaacccaatccattttgactaacctccaacgtcgaatacggtaaagctactggtgcttttccatcaggtcataagaaagactccatatgctccaggtgctaatccagaaaatggtatggattctcatggtatgttgctctatgttctccgttggtaagatcgattacaacgatgctttggatggtatttctttgaaacactattaccccagatggtttgggtagagacgaagaagaaagaatcggtaacttggggtattttggatgctggtaatggtcatggtctataccatgctaacatcaacgtcttgaaaagaacaattggaagatgccgttgaacacccagaaaagtatccacatttgaccgttagtttctggttacgctgttaacttcgtcaagttgaccaaagaacaacaattggatgtcatccagaacttttcatcaaggtgctgttgttgattaa

SEQ ID NO: 223 - protein, 791 aa, Bifidobacterium adolescentis; identical to SEQ ID NO: 74

SEQ ID NO: 224 - DNA, 1654 bp, Saccharomyces paradoxus
atgaaggactccaagttgtctaagttcaagggtagattcatgtccagaacttctcattggtttgactggtcaaaagttgagatacttcattaccattgcttctatgaccggtttctttgtttggttatgaccaaggtttgatggcctctttgattactggtaagcaattcaactgaattcccagctaccaaagaaaacggtgatcatgatagacatgctaccgttgttcaaggctactacttcttgttatgaattgggttgtttcgccggttctttgttcgttatgttttggtgaaagaatcggtagaaagccattgattttgatgggttccattatcaccattatcggctgttatttctacctgtgctttcagagattattgggctttgggtcaattcatcgttgagagttgttactggtgttggtactggtttgaacacttctactattccagtttggcaatgaaatgtctaaggctgaaaacagaggtttgttggttaacttggaaggttccactattgttcggtactatgattgcttactggatcgatttcggtttttcctacactaactcttccgcaatggagatttccagtctctatgcaaatcgttttcgccttgtttttgttggccttcaattaagttgccagaatctccaagatggttgatctctcaatctagaactgaagaagccatacttggttggtactttggatgatactgatccaaacgatgaagaagttattaccgaaggccatgttgcatgatgccgttaatagaactaagcacgaaaagcactcattgtcatcctttttctagaggtaagtcccaaaacttgcaaagagctttgattgctgcttctacccaatttccaacaattcactggttgtaatgctgccatctactactctactgttttgttcaacaaccatcaagttggaccacagattgtccatgattattggtggtgttttcgctactatctgccttgtctactattggttccttcttcttgatcgaaaaattaggtagaagaaagttgtttgttgggtgctactggtcaagctgtttctttcactattacctttgcttgcttggtaagaaaacaaagaaaatgctagaggtgctgccgttggtttgttcttattcattactttctggtttgtccttgttgtctttgccatggatctatccaccagaaattgcttcaatgaaggagagcatctaccaatgctttctctacttgtacaaactggttgtgcaatttcgccgttgatgttcaccccaattttcattggtcaatctggttggggttgttacttgttttttgccgatgaactacttgtatatcccagttatattctttttctaccctgaaaccgctggtagatttggaagaaattgatattatcttcgccaaggcctacgaagatggtactcaaccttggagttgctaatcatttgccaaagttgtccttgcaagaagttgaagatcacgctaatgcttggttcttatgatgacgaaatggaaaaggatgatttcgccgaagatagagtcgaagatatacaatcaaatcaacggtgacaactcctcttcctcctctaatatcaaaaacgaagatagttaacgacaaggccaactctgaatcttga

SEQ ID NO: 225 - protein, 569 aa, Saccharomyces paradoxus
MKDSKLSKFKGRFMSRTSHWGLTGQKLRYFITIASMTGFSLFGYDQGLMASLITGKQFNYEFPATKENGDHDRHATVVQGATTSCYELGCFAGSLFVMFYGERIGRKPLILMGSIITIIGAVISTCAFRDYWALGQFIVGRVVTGVGTGLNTSTIPVWQSEMSKAENRGLLVNLEGSTIAFGTMIAYWIDFGFSYTNSSVQWRFPVSMQIVFALFLLAFMIKLPESPRWLISQSRTEEARYLVGTLDDTDPNDEEVITEVAMLHDAVNRTKHEKHSLSSLFSRGKSQNLQRALIAASTQFFQQFTGCNAAIYYSTVLFNKTIKLDHRLSMIIGGVFATIYALSTIGSFFLIEKLGRRKLFLLGATGQAVSFTITFACLVKENKENARGAAVGLFLFITFFGLSLLSLPWIYPPEIASMKVRASTNAFSTCTNWLCNFAVVMFTPIFIGQSGWGCYLFFAVMNYLYIPVIFFFYPETAGRSLEEIDIIFAKAYEDGTQPWRVANHLPKLSLQEVEDHANALGSYDDEMEKDDFAEDRVEDTYNQINGDNSSSSSNIKNEDTVNDKANSES

SEQ ID NO: 226 - protein, 335 aa, Saccharomyces cerevisiae
MSEPAQKKQKVANNSLEQLKASGTVVVADTGDFGSIAKFQPQDSTTNPSLILAAAKQPTYAKLIDVAVEYGKKHGKTTEEQVENAVDRLLVEFGKEILKIVPGRVSTEVDARLSFDTQATIEKARHIIKLFEQEGVSKERVLIKIASTWEGIQAAKELEEKDGIHCNLTLLFSFVQAVACAEAQVTLISPFVGRILDWYKSSTGKDYKGEADPGVISVKKIYNYYKKYGYKTIVMGASFRSTDEIKNLAGVDYLTISPALLDKLMNSTEPFPRVLDPVSAKKEAGDKISYISDESKFRFDLNEDAMATEKLSEGIRKFSADIVTLFDLIEKKVTA

SEQ ID NO: 227 - protein, 600 aa, Saccharomyces cerevisiae
MLCSVIQRQTREVSNTMSLDSYYLGFDLSTQQLKCLAINQDLKIVHSETVEFEKDLPHYHTKKGVYIHGDTIECPVAMWLEALDLVLSKYREAKFPLNKVMAVSGSCQQHGSVYWSSQAESLLEQLNKKPEKDLLHYVSSVAFARQTAPNWQDHSTAKQCQEFEECIGGPEKMAQLTGSRAHFRFTGPQILKIAQLEPEAYEKTKTISLVSNFLTSILVGHLVELEEADACGMNLYDIRERKFSDELLHLIDSSSKDKTIRQKLMRAPMKNLIAGTICKYFIEKYGFNTNCKVSPMTGDNLATICSLPLRKNDVLVSLGTSTTVLLVTDKYHPSPNYHLFIHPTLPNHYMGMICYCNGSLARERIRDELNKERENNYEKTNDWTLFNQAVLDDSESSENELGVYFPLGEIVPSVKAINKRVIFNPKTGMIEREVAKFKDKRHDAKNIVESQALSCRVRISPLLSDSNASSQQRLNEDTIVKFDYDESPLRDYLNKRPERTFFVGGASKNDAIVKKFAQVIGATKGNFRLETPNSCALGGCYKAMWSLLYDSNKIAVPFDKFLNDNFPWHVMESISDVDNENWDRYNSKIVPLSELEKTLI

SEQ ID NO: 228 - protein, 680 aa, Saccharomyces cerevisiae
MTQFTDIDKLAVSTIRILAVDTVSKANSGHPGAPLGMAPAAHVLWSQMRMNPTNPDWINRDRFVLSNGHAVALLYSMLHLTGYDLSIEDLKQFRQLGSRTPGHPEFELPGVEVTTGPLGQGISNAVGMAMAQANLAATYNKPGFTLSDNYTYVFLGDGCLQEGISSEASSLAGHLKLGNLIAIYDDNKITIDGATSISFDEDVAKRYEAYGWEVLYVENGNEDLAGIAKAIAQAKLSKDKPTLIKMTTTIGYGSLHAGSHSVHGAPLKADDVKQLKSKFGFNPDKSFVVPQEVYDHYQKTILKPGVEANNKWNKLFSEYQKKFPELGAELARRLSGQLPANWESKLPTYTAKDSAVATRKLSETVLEDVYNQLPELIGGSADLTPSNLTRWKEALDFQPPSSGSGNYSGRYIRYGIREHAMGAIMNGISAFGANYKPYGGTFLNFVSYAAGAVRLSALSGHPVIWVATHDSIGVGEDGPTHQPIETLAHFRSLPNIQVWRPADGNEVSAAYKNSLESKHTPSIIALSRQNLPQLEGSSIESASKGGYVLQDVANPDIILVATGSEVSLSVEAAKTLAAKNIKARVVSLPDFFTFDKQPLEYRLSVLPDNVPIMSVEVLATTCWGKYAHQSFGIDRFGASGKAPEVFKFFGFTPEGVAERAQKTIAFYKGDKLISPLKKAF

SEQ ID NO: 229 - protein, 258 aa, Saccharomyces cerevisiae
MAAGVPKIDALESLGNPLEDAKRAAAYRAVDENLKFDDHKIIGIGSGSTVVYVAERIGQYLHDPKFYEVASKFICIPTGFQSRNLILDNKLQLGSIEQYPRIDIAFDGADEVDENLQLIKGGGACLFQEKLVSTSAKTFIVVADSRKKSPKHLGKNWRQGVPIEIVPSSYVRVKNDLLEQLHAEKVDIRQGGSAKAGPVVTDNNNFIIDADFGEISDPRKLHREIKLLVGVVETGLFIDNASKAYFGNSDGSVEVTEK

SEQ ID NO: 230 - protein, 398 aa, Saccharomyces cerevisiae
MSQNVYIVSTARTPIGSFQGSLSSKTAVELGAVALKGALAKVPELDASKDFDEIIFGNVLSANLGQAPARQVALAAGLSNHIVASTVNKVCASAMKAIILGAQSIKCGNADVVVAGGCESMTNAPYYMPAARAGAKFGQTVLVDGVERDGLNDAYDGLAMGVHAEKCARDWDITREQQDNFAIESYQKSQKSQKEGKFDNEIVPVTIKGFRGKPDTQVTKDEEPARLHVEKLRSARTVFQKENGTVTAANASPINDGAAAVILVSEKVLKEKNLKPLAIIKGWGEAAHQPADFTWAPSLAVPKALKHAGIEDINSVDYFEFNEAFSVVGLVNTKILKLDPSKVNVYGGAVALGHPLGCSGARVVVTLLSILQQEGGKIGVAAICNGGGGASSIVIEKI

SEQ ID NO: 231 - protein, 825 aa, Bifidobacterium adolescentis; identical to SEQ ID NO: 154

SEQ ID NO: 232 - protein, 556 aa, Bifidobacterium adolescentis; identical to SEQ ID NO: 120

SEQ ID NO: 233 - protein, 409 aa, Bifidobacterium adolescentis; identical to SEQ ID NO: 126

SEQ ID NO: 234 - protein, 217 aa, Alkaliphilus metalliredigens
MSKVKTMQEAIEYIQDGMTVMVGGFLGCGSPHYVIDALVAKGVKELTLICNDTAFPEQGVGKMIVNKQFKKVIVSHIGTNLETGRQMNEGETEVVLVPQGTLVEQIRAGGAGLGGFLTHTGVGTRVEEGKEKIEINGKTYLLEMPLKADVAIIFGNKVDKKGNIYYRGASRNFNPAMATAADVVIVEAEEIVEAGEIEPENVVTPGIFVDHIVRGEV

SEQ ID NO: 235 - protein, 220 aa, Alkaliphilus metalliredigens
MDKKLIKQFIAKRVAKEMKDGDVVNLGIGLPTLVANYIPDEVDIILQSENGFVGLGTMPQEGQEDPCVVNAGGQPVTIKKGGAFFDSCMSFAIIRGGHVDATVLGALQVDEKGNLANWMIPGKMVPGMGGAMDLVVGAKKVIVAMEHTAKGNHKILKQCTLPLTAIQQVDIIITEMGVMEVTKQGLVLREINPEFTIDQVREATGAELVIDENVKKMDLV

SEQ ID NO: 236 - protein, 246 aa, Paenibacillus polymyxa
MNQKDVLSLQSMPAASGSYGRPPYRFINREFFIITYESDPAAIRQAIPEPLQPDGSNTVSYEWIKMPDSSGLGSYEESGIVIPCTFHGEPCNFVAQMYLDNAPAILGGREVWGFPKKWAKPRLVVEETETLTGTLHYNNVLVAMGTMPFKYNILDEKETAKAIAKTQVNLKLIPDVDGTPKIAQLVAYNLENITVKGAWSGPARLSLIPHVNAPVADLPVKAYIGGKHFIADLTLPYGRVLYDYLQ

SEQ ID NO: 237 - protein, 683 aa, Saccharomyces cerevisiae
MTIKEHKVVYEAHNVKALKAPQHFYNSQPGKGYVTDMQHYQEMYQQSINEPEKFFDKMAKEYLHWDAPYTKVQSGSLNNGDVAWFLNGKLNASYNCVDRHAFANPDKPALIYEADDESDNKIITFGELLRKVSQIAGVLKSWGVKKGDTVAIYLPMIPEAVIAMLAVARIGAIHSVVFAGFSAGSLKDRVVDANSKVVITCDEGKRGGKTINTKKIVDEGLNGVDLVSRILVFQRTGTEGIPMKAGRDYWWHEEAAKQRTYLPPVSCDAEDPLFLLYTSGSTGSPKGVVHTTGGYLLGAALTTRYVFDIHPEDVLFTAGDVGWITGHTYALYGPLTLGTASIIFESTPAYPDYGRYWRIIQRHKATHFYVAPTALRLIKRVGEAEIAKYDTSSLRVLGSVGEPISPDLWEWYHEKVGNKNCVICDTMWQTESGSHLIAPLAGAVPTKPGSATVPFFGINACIIDPVTGVELEGNDVEGVLAVKSPWPSMARSVWNHHDRYMDTYLKPYPGHYFTGDGAGRDHDGYYWIRGRVDDVVNVSGHRLSTSEIEASISNHENVSEAAVVGIPDELTGQTVVAYVSLKDGYLQNNATEGDAEHITPDNLRRELILQVRGEIGPFASPKTIILVRDLPRTRSGKIMRRVLRKVASNEAEQLGDLTTLANPEVVPAIISAVENQFFSQKKK

SEQ ID NO: 238 - protein, 652 aa, Salmonella enterica
MSQTHKHAIPANIADRCLINPEQYETKYKQSINDPDTFWGEQGKILDWITPYQKVKNTSFAPGNVSIKWYEDGTLNLAANCLDRHLQENGDRTAIIWEGDDTSQSKHISYRELHRDVCRFANTLLDLGIKKGDVVAIYMPMVPEAAVAMLACARIGAVHSVIFGGFSPEAVAGRIIDSSSRLVITADEGVRAGRSIPLKKNVDDALKNPNVTSVEHVIVLKRTGSDIDWQEGRDLWWRDLIEKASPEHQPEAMNAEDPLFILYTSGSTGKPKGVLHTTGGYLVYAATTFKYVFDYHPGDIYWCTADVGWVTGHSYLLYGPLACGATTLMFEGVPNWPTPARMCQVVDKHQVNILYTAPTAIRALMAEGDKAIEGTDRSSLRILGSVGEPINPEAWEWYWKKIGKEKCPVVDTWWQTETGGFMITPLPGAIELKAGSATRPFFGVQPALVDNEGHPQEGATEGNLVITDSWPGQARTLFGDHERFEQTYFSTFKNMYFSGDGARRDEDGYYWITGRVDDVLNVSGHRLGTAEIESALVAHPKIAEAAVVGIPHAIKGQAIYAYVTLNHGEEPSPELYAEVRNWVRKEIGPLATPDVLHWTDSLPKTRSGKIMRRILRKIAAGDTSNLGDTSTLADPGVVEKPLEEKQAIAMPS

SEQ ID NO: 239 - protein, 675 aa, Zygosaccharomyces bailii; identical to SEQ ID NO: 6

SEQ ID NO: 240 - protein, 590 aa, Acetobacter aceti
MLPWTTYEAMYDAALNQPEQFWLAAAQRVTWKQAPVTACRTRSDGWHDWFPDATLNTCHNAVDRHVENGRGGQAALIWHSCATRERQVITYRELQSRVAGFAGGLRSLGVEKGERVLIAMPTMIETVIAMLACARIGAVHVVVFAGYAGPELARRIDDAAPKVIIIASCSFQGQTPVPSVPALNEALAAATHCPQACVIVQREACPVSLLPVRDHDFHTLEQSAPAEPLMLRSEDPLYILHTSGTTGNAKGIVRDNGGHAVALALSMDLIYGCKPGDTFFTTSDLGWVVGHSYGVYAPLISGCTSVIVEGGASASAIRMLCHEHAVKCLFTTPTQMRLMRQESRHLSGAILPALARIFVAGEYADPTLLEWTRSYFRKPVVNHWWQTETGWSITAHFFGLPEREPVSLMNDIGRPAPGFCPAIVPSIADEQYGEIVLSLPLPPGCLAGMWKDGAIRLPSTYLDEIGRYYRTFDEGMIEANRAVHMLGRSDDVIKVAGRRISGVQIEKIIATHPAVHTCAVVAIPDELRGQRPVAYVVVDPEASCEPSSEEIVVLVNEVLGRWVGLKEVRFIRHLPTTVSGKITRKRLLVS

SEQ ID NO: 241 - protein, 392 aa, Clostridium acetobutylicum
MRDVVIVSAVRTAIGAYGKTLKDVPATELGTIVIKEAVRRANINPNEINEVIFGNVLQAGLGQNPARQAAVKAGLPLETPAFTINKVCGSGLRSISLAAQIIKAGDADTIVVGGMENMSRSPYLINNQRWGQRMGDSELVDEMIKDGLWDAFNGYHMGVTAENIAEQWNITREEQDEFSLMSQQKAEKAIKNGEFKDEIVPVLIKTKKGEIVFDQDEFPRFGNTIEALRKLKPIFKENGTVTAGNASGLNDGAAALVIMSADKANALGIKPLAKITSYGSYGVDPSIMGYGAFYATKAALDKINLKPEDLDLIEANEAYASQSIAVTRDLNLDMSKVNVNGGAIALGHPIGASGARILVTLLYAMQKRDSKKGLATLCIGGGQGTALVVERD

SEQ ID NO: 242 - protein, 393 aa, Cupressus arizonica
MQDPIVIVSAARTPMAAFQGEFASLTAPQLGAVAIRAAVERAGIKPEQVEEVVFGCVLPAGQGQAPARQAALGAGLPLSVGCTTVNKMCGSGMRAAMNVYDGLVAGSFDIAVAGGMESMTNAPYLIPKGRGGYRIGHGMMYDHMMLDGLEDAYDKGRAMGTFGEDCAAKYGFTREQQDTFAIESVRRAQQATEAGDFRWEIAPVTVSGKGGDTVIDTDEGPRRIKTDKIPSLKPAFAKDGTITAASSSSINDGASALVMMRESTAKKLGLRPIARMLGHTTHAQAPGWFTTAPVEAMAKLYRKLDWTTDSIDLFEINEAFAVVPMAAMHDLKIPREKVNIHGGACALGHPIGASGARIMTTLIGALRKTGGKRGVASLCIGGGEATAVGIEIV

SEQ ID NO: 243 - protein, 391 aa, Clostridium kluyveri
MREVVIVSAVRTAIGSFGGTLKDVPAVELGAVVIKEAVKRANVKPEQIDEVIFGNVIQAGLGQSPARQAAVKAGIPVEVPAFTLNKVCGSGLRSVSLAAQVIKAGDADIVVVGGMENMSAAPYVLPKARWGHRMGEGKIVDAMIKDGLWEAFNNYHMGITAENIAEKWGLTREEQDEFSAASQQKAEAAQKAGKFKDEIVPVTVKIKKKEVVFDTDEYIKPGTTVETLAKLRPAFKKDGTVTAGNASGINDAAAALVVMSADKAKELGIKPLAKIVSYGSAGLDPTIMGYGPFHATKAALEKANLSVADLDLIEANEAFASQSLAVAKDLEFDMSKVNVNGGAIALGHPVGASGARILVTLLHEMQRRDAKKGLATLCIGGGMGTALIVER

SEQ ID NO: 244 - protein, 392 aa, Yarrowia lipolytica
MEPVYIVSTARTPIGSFLSSLSGQTYVDLGAHAVKAALAKTDIKPDQVDEIIFGNVLSAGVGQAPARQVALKAGLPDTIVATTVNKVCASGMKAIIQGAQAIMTGSADIVIAGGAESMSNVPHYVQARVANKYGNGSLVDGIQRDGLFDAYDGQAMGVAAEVCADTHSISREEQDEFAIGSYKKTQAAYAAGKFKDEIAPIELPGFRGKPGVVVSEDEEYKNLNEDKLKSARTVFKKDGTVTAPNASPINDGGAAVILASAAKVKELGLKPLLKIVSWGEAANEPVKFTTAPALAVPVALKRAGLEAKDIDFYEFNEAFSVVGIANTKLLGLDSSKVNVYGGAVAIGHPLGCSGARVIVTLNSVLHQEGGKYGCAAICNGGGGASSIIVEKC

SEQ ID NO: 245 - protein, 392 aa, Thermoanaerobacterium thermosaccharolyticum
MKEVVIASGVRTAVGKFGGTLLNVPAVDLGAVVIKEALKRANVKPEDVSEVIMGNVLQAGLGQNPARQAEIKAGIPVEVPAMTVNMVCGSGLRAVTLAAQAVMLGDADIVVAGGMENMSRAPYILNDARFGYRMNNGQLVDEMVYDGLTDVFNQYHMGITAENLAEKYGISREEQDEFAYRSQKLASEAISSGRFEDEIVPVIVPQKKGEPIEFKVDEHVRPNTTIEALAKLKPAFKKDGTVTAGNASGINDAAAAVVVMSKEKADELGIKPLATIKSFGYAGVDPSIMGIGPVYATRKALEKANLTVDDLDLIEANEAFAAQSLAVAKELKFNMDRVNVNGGAIAIGHPIGASGCRILVTLLYEMQKRNSHTGLATLCIGGGMGIAMVVER

SEQ ID NO: 246 - protein, 421 aa, Saccoglossus kowalevskii
MATNMVKCSLFSRLNNHAIRHVIKRDVSAVKGLNDVVIVSAVRTPIGSFRSSLSSVPAPRLGSIAIKNAVEKAGIAPEEVQEVYMGNVLQAGQGQAPTRQAVLGAGLSLGTPCTTINKVCASGMKSIMMAAQSLMCGHQDVMVAGGMESMSNVPFMMKRDAPAYGGHRLEDGIVADGLTDVYNKFHMGNCAENTAKKLEIGREAQDQYAIQSYKNSQRAAADGILKKEIVPVIIPQRKGPEIVVEEDEEYKKVNFDKFSSLRTVFQKDGGTVTAANASTLNDGAGAVVLMSAQAAARLNVKPLARILGFGDAAVAPIDFPIAPVPAMAKVLEQTGVKQDDIAMFEINEAFSVVVLAICKLMNLDTSKVNVNGGAVSIGHPIGMSGTRIVGHMVHNLKPGEKGLAGICNGGGGAAALLLERL

SEQ ID NO: 247 - protein, 417 aa, Strongylocentrotus purpuratus
MASNIMRALPRKLVTRSCSCRQFSTVKGLNDVVIVSSVRTPIGSFRGSLASLPAHRMGSMVIQAAIEKAGITPEDVNEVYMGNVLQAGQGQAPTRQAALGAGLPLGTPCTTVNKVCASGMKSIMMAAQSLMCGHQDVMVAGGMESMSNVPLLMARGDPGYGGAKLEDAIVGDGLTDAYNKFHMGNCGEDTARKLGFSREEQDDFAISSYQKSQAAGANKVFDKEIIPVGVPQKRGKPDVVVSEDEEYSKVNFDKVRSLKAAFEKDGTVTAANASTLNDGAAAMVLMTAQAAVKLKVKPLARIVGFADAAVAPIEFPIAPAYAMPKVLEQTGVKKEDIAMFEINEAFSVVALANMKLLDLDPTKVNINGGAVSIGHPIGMSGARITGHMVHNLKPGEKGLAGICNGGGGASAILIERL

SEQ ID NO: 248 - protein, 394 aa, Paenibacillus polymyxa
MKKVAIVSPLRTAVGSFNKALAPLSAPELGATVMTACLQQSKLEPSLIDQIFMGNVLQAGNGQNPARQAALKAGIPIDVPESTINTVCGSGLHAVALAYDSILAEQGNIVMAGGMESMSNAPYLLKNARNGYKLGNGELVDSLVADGLTCPINHYHMGITAENVAEKYGISRLEQDAFAYESQIKASKAKNNKFFEEQIVPVMIKNKKETTYFTEDEHIRGNTTKEKLSNLKPAFKENGTVTAGNASGINDGAAAMLVVSEDKCKEHALKPLAYIKGYSLVGVDPAYMGMGPVKAISSLLQKQGMSIDSIDLFEINEAFAAQALAVQKELGVNPEKVNVNGGAIAIGHPVGASGARVLVTLVHEMVRRSSRYGVVSLCIGTGMGIAMLVENARI

SEQ ID NO: 249 - protein, 218 aa, Clostridium acetobutylicum
MNSKIIRFENLRSFFKDGMTIMIGGFLNCGTPTKLIDFLVNLNIKNLTIISNDTCYPNTGIGKLISNNQVKKLIASYIGSNPDTGKKLFNNELEVELSPQGTLVERIRAGGSGLGGVLTKTGLGTLIEKGKKKISINGTEYLLELPLTADIALIKGSIVDEAGNTFYKGTTKNFNPYMAMAAKTVIVEAENLVSCEKLEKEKAMTPGVLINYIVKEPA

SEQ ID NO: 250 - protein, 217 aa, Thermosipho melanesiensis
MKVVDISKINELVKEGATLMIGGFLGVGTPENIIDEIIRHNISNLTVIANDTAFEDRGIGKLVKNKLCKKVIVSHIGTNPETQRQMIEGTLEVELVPQGTLAERIRAAGVGLGGILTPTGVGTVVEKDKKVIEVEGKKYLLELPIHADVALIKAKKADYLGNLVYNLTAENFNPIMALAAKTVIAEVEEIVPTGTLSPNEIKTPGIIVDYIVTGVTR

SEQ ID NO: 251 - protein, 220 aa, Escherichia coli
MKTKLMTLQDATDFFRDGMTIMVGGFMGIGTPSRLVEALLESGVRDLTLIANDTAFVDTGIGPLIVNGRVRKVIASHIGTNLETGRRMISGEMDVVLVPQGTLIEQIRCGGAGLGGFLTPTGVGTVVEEGKQTLTLDGKTWLLERPLRADLALIRAHRCDTLGNLTYQLSARNFNPLIALAADITLVEPDELVETGELQPDHIVTPGAVIDHIIVSQESK

SEQ ID NO: 252 - protein, 221 aa, Paenibacillus polymyxa
MNNKVISAEEAVKKIKDGDTVMVGGFLAGGFPEDLVRALVDTNPASNLTIISNDTGTPELSIYKLVKSGRVKRIFASYIGSNPETGRLLMTKEAEVQLFPQGTLAEKIRAGGAGLGGVLTPVGVGTVVEEGKKKIEIDEREYLLELPLKADVALIRAHKADEAGNLVINGSSRNFNMVMATAAEYVVAQIDEYVKTGEIDPNHVNVPGIFVDAMVKVGENA

SEQ ID NO: 253 - protein, 218 aa, Clostridium beijerinckii
MANKIKSVSEVIEFIKDDMTVMIGGFMAVGTPEILIDAILEKGVKNLTIIANDTGLPDKGIGKLIVNKRVKKVIASHIGLNPETGRQMNNKELIVDLVPQGTLVEQIRCGGAGIGGFLTETGVGTICEEGKQKLKVKDKEYLLELPLRADIALIGGSIADTQGNIFYKGSTRNFNPLMATAADLVIAGAERIVEAGELDPNHVMTPGIFVDYIVGGKN

SEQ ID NO: 254 - protein, 217 aa, Clostridium saccharoperbutylacetonicum
MDKVKSIDEVMEYIKDGMTIMVGGFMGVGTPEMLIDAIVKKNVKDLTIIANDTGLPDKGVGKLVVNKQVKKVVASHIGLNPETGKQMNTGEMEVDLVPQGTLAERIRCGGAGIGGFLTETGIGTAVEEGKQKLKLNHKEYILELPLRADMALVGGSVVDKKGNIFYNASTRNFNPLIATAADLVIVGAEKIVEVGDLDPNHVMTPGIFVDYIVGGDN

SEQ ID NO: 255 - protein, 216 aa, Clostridium sticklandii
MNKIVSLDFAMDHVKDGMTLMIGGFLGVGTPEIFIDELIKREIKDLTIIANDTSFVDKGLGRLIESKQVKKVIASHIGTNPETGRQMNEKEMEVELVPQGTLAERVRSGGTGLGGVLTPTGLGTMVEEGKQKIEVDGVTYLLETALRADVALLLGHKVDKKGNTLYDKSARNFNPLMAMAADTVIMLAENLVEVGDIDAEHIITPGILVDYIVKGE

SEQ ID NO: 256 - protein, 232 aa, Brevibacillus laterosporus
MISQSTWNKEISLEEALEHFHDGMTLMVGGFGGVGNPPTLIQGLLEKQIKGLTLISNDTAFPDIGVGRLITQRRVKKVIASHIGSNPNAGAQMTAGELEVEFCPQGILAERVRAGGVGLGGILSDIGIGTIAEEGKQQVIVDGKTFLIETPLTAQVAIVSAKKADRFGNLVFDTSARNFNPLVAMAGDITIVEAEEIVEIGELDPEEIVTPGVFVTYIVQSEGVNWRWAWEK

SEQ ID NO: 257 - protein, 181 aa, Clostridium acetobutylicum
MINDKNLAKEIIAKRVARELKNGQLVNLGVGLPTMVADYIPKNFKITFQSENGIVGMGASPKINEADKDVVNAGGDYTTVLPDGTFFDSSVSFSLIRGGHVDVTVLGALQVDEKGNIANWIVPGKMLSGMGGAMDLVNGAKKVIIAMRHTNKGQPKILKKMYTSPHGKVSSKSNCNRTWSN

SEQ ID NO: 258 - protein, 214 aa, Thermosipho melanesiensis
MNPKEKIAIRVAQELKKGQLVNLGIGLPTLVANYIPKDIHVFFQSENGIIGMGPAPKEGYENSDLTNAGASYITALPGAMTFDSAFSFGIIRGGHLDVTVLGGLQVDEEGHLANWMIPGKMIPGMGGAMDLVTGAKKVIVAMTHTAKGTPKIVKKCTLPLTSIRKVDLIVTELAVIEPTDEGLLLKEISKETTLDEVLKLTEAKLIIADDLKIF

SEQ ID NO: 259 - protein, 216 aa, Escherichia coli
MDAKQRIARRVAQELCDGDIVNLGIGLPTMVANYLPEGIHITLQSENGFLGLGPVTKAHPDLVNAGGQPCGVLPGAAMFDSAMSFALIRGGHIDACVLGGLQVDEQGNLANWVVPGKMVPGMGGAMDLVTGSRKVIIAMEHCAKDGSAKILRQCTMPLTALHAVHMLVTELAVFRFIDGKMWLTEIAEGCDLETVRAKTGAQFAVADDLLLPQGAL

SEQ ID NO: 260 - protein, 218 aa, Paenibacillus polymyxa
MNNRELIIRRIAQEFKDGEVVNLGIGLPTMAVDYIPENVNIMLQAENGIVGVGPKAAPGKERVDCIDSGGNYVTTVKGACFLDSALSFSIIRGGHVDVTVLGALEVDEKGNLANWMIPGKKVPGMGGAMDLVVGAKRVIVAMEHVNKNGAPKILKQCKLPLTAVNVVKTIVTEKAVIDVIPGKGLLLKEIAPGLSVEDVQKATEAELIVSPHLKTMAV

SEQ ID NO: 261 - protein, 218 aa, Clostridium beijerinckii
MEAENVKEFIAKRIAKELKDGDVVNLGIGLPTMVANYIPKGVNVVLQSENGFVGLGSEPAEAETDKDIVNAGGQPVTIKTGAAFFDSATSFGIIRGGHVDATVLGALEVDEKGNLANFMVPGKMVPGMGGAMDLVSGAKKVIIAMTHTAKGSPKILKDCKLPLTAVGKVSLIVTEMGVMEVTNSGLVLKEYNPKYTIEEIKSATEAELIIDNDLCKMQ

SEQ ID NO: 262 - protein, 221 aa, Clostridium saccharoperbutylacetonicum
MIVDKVLAKEIIAKRVAKELKKGQLVNLGIGLPTLVANYVPKEMNITFESENGMVGMAQMASSGENDPDIINAGGEYVTLLPQGAFFDSSMSFALIRGGHVDVAVLGALEVDEKGNLANWIVPNKIVPGMGGAMDLAIGAKRIIVAMQHTGKGKPKIVKKCILPLTAKAQVDLIVTELCVIDVTNDGLLLKEIHKDTTIDEIKFLTDADLIIPDNLKIMDI

SEQ ID NO: 263 - protein, 215 aa, Clostridium sticklandii
MSREIIAKRVAKELHDGDVVNLGIGMPTLVANYVSDDIDVVFQSENGFVGLGPAPAQGEEIPNLVNAGAQPVSIKKGGVFFDSAMSFGIIRGGHVDVTVLGALQVDEKGNLANWMIPGKMVPGMGGAMDLVVGAKKVIVAMEHTAKGKHKILKNCNLPLTAKAQVNLIVTEMGVMEVTENGLLLKEIAKDITVEQIQEATEATLIIDKNLKVMEA

SEQ ID NO: 264 - protein, 218 aa, Brevibacillus laterosporus
MTLSREQVAMRAAQEIEDGFYVNLGIGMPTLVANYIAEDKTVVLQSENGLLGIGPYPYADDIDPDLINAGKETVTAISGASYFSSAESFGMIRGGHIDLAILGAMEVSEKGDLANWMIPGKMVKGMGGAMDLVHGAKKIVVIMEHVNKHGESKILPACTLPLTGKQVVNRIITDRAVFDVTSEGLTLIEVADGFTADDIKACTAASFQVANELKTVIV

SEQ ID NO: 265 - protein, 244 aa, Clostridium acetobutylicum
MLKDEVIKQISTPLTSPAFPRGPYKFHNREYFNIVYRTDMDALRKVVPEPLEIDEPLVRFEIMAMHDTSGLGCYTESGQAIPVSCNGVKGDYLHMMYLDNEPAIAVGRELSAYPKKLGYPKLFVDSDTLVGTLDYGKLRVATATMGYKHKALDANEAKDQICRPNYMLKIIPNYDGSPRICELINAKITDVTVHEAWTGPTRLQLFDHAMAPLNDLPVKEIVSSSHILADIILPRAEVIYDYLK

SEQ ID NO: 266 - protein, 246 aa, Clostridium beijerinckii
MLESEVSKQITTPLAAPAFPRGPYRFHNREYLNIIYRTDLDALRKIVPEPLELDGAHVRFEMMAMPDTTGLGSYTECGQAIPVKYNGVKGDYLHMMYLDNEPAIAVGRESSAYPKKFGYPKLFVDSDTLVGTLKYGTLPVATATMGYKHEPLDLKEAYAQIARPNFMLKIIQGYDGKPRICELICAENTDITIHGAWTGSARLQLFSHALAPLADLPVLEIVSASHILTDLTLGTPKVVHDYLSKS

SEQ ID NO: 267 - protein, 248 aa, Bacillus amyloliquefaciens
MKIEVKDIAKNLNTPLTAPAYPIPNYKFVNREYLNIIYRTDEKALRAAVPEPLEITEPLVKFEVMRMPDVSGLGAYTEAGQVIPVSFNGEEGDYVHSMYVDNFPAIASGRELTAYPKKLGAPKLYIDSDTLVGTLDYGSLRVAAATMGYKHFEMDKEKAKREICRPNFMVKIATDYNGDLRVCDLVRTQITNIEVKGAWSGPARLQLFEHALAPLADLPVLEVVSASHIITDLTLNAAQPVYNYLEEK

SEQ ID NO: 268 - protein, 252 aa, Rhizobium leguminosarum
MKIAAVRENAFAMPLNNPAYPRPPYKFYNREFVVIHYRTDPETLRAVVPEPLEVIGDTVAYEFIRMPDSTGFGDYTETGQVIPVRFTTPSGKVQEGSYVHAMYLDDNSPIAGGREIWGFPKKLATPKLSHEQETLVGTLHYGSVLCVMATMGYKHRELPLEPLAKAMAKPAFVLKVIPDVDGSPRICELVRYYLEDVTLKGAWAGPAALQLFEHVTCDVARLPMREVTSASHYIADLTLGLGEVVFDYLQND

SEQ ID NO: 269 - protein, 258 aa, Bradyrhizobium japonicum
MRREDVLRLPSMPAAGPSYPAGPYRFVNREFLVITYETDPELIRAGLPEPLEPIDQPIVHYEWIKMPDSSGFGSYTESGLVIPARLNGEEVNFVSQMYLDDDPPIAAGREIWGFPKKYAHPKLEIVKDTLTGTLEYAGQLVAMGTMGYKHESMAGNGDRTRTTLSKTQINLKMIPGVDGRLEVCQLVAINLIDIVPKGSWMGPGRLHLVPHVNAPVADFPVRRCLGAHHYIADLTLPFGRVVHDYVKEAAAATGLAAE

SEQ ID NO: 270 - protein, 553 aa, Tetrahymena thermophila
MSSTGLHQITEEVHHTTHKSGNYVKGNRKYLDQRLKREEILKLPSQPAISPSFPFGPYRFIDREYLIISYETDIEVLRKVVPYPLVPQSNVVLYEWINMPDSSGFGSYSETGTVIPCLLNGEPVNFTLQMYLNNEAPIASGREIWGFPKKYAKPSMGINKDTLVGRLNYSGEQIAFGTMTYKYKKIPEAEALKSLTKLQCVLKYIPDVDWSPKIAQLIGFNLCDIQLKEAWEGPAKLELIPHVNAPTTLLPVLKVLGGKHIKADITLPFGKVLHDYVESVGGQENAKEIAKGHRGEQGQLDFSIQEDVLRAASMPLIAPSFSKGPLIMDDREYLIFQYESTPEAIARALPEPLIPYDHNYVYLYFINASGSGLGEFHKLDMYVPCYLGNELVMFGVQSYLNSSASRTAGREVFGQPQKFGDAEITVCRDTLKATLKYSDETIAFATMSYKFNKLDPHKAREMLEIPMVNLKFIPSAVEGKVDIAQLTKMEYSDIHVTASYHSPCQVSLVHHVNAPLKDLPVVKTLDGYHIKADTIIKKATVAYDYLLDKSFIQ

SEQ ID NO: 271 - protein, 250 aa, Aspergillus niger
MPFGTFELTGDAIPQYAPPYPTGDCDFTGSTILVITYRTTAHSVAPFVPSMLELEDEPLITVRLLRHSMTSFGPYNEYTHGVDVRYRGEKYEYFLSLILDNESPVLAGREQYGFPKKFGTVEFNPSEPRGTRVMCGHVEHPPHQKILQMNYSPVRKQAVPDVGMKVESRCMNLRVLPSPIAGQPPSVRELMPLALKITAKEIWEGEGSVSFPEPSEVDPMHRIEIVRYESAHFLREANLWLGPTGEVYSV
